(19) United States
(12) Patent Application Publication
(10) Pub. No.: US 2003/0170719 A1
(43) Pub. Date: Sep. 11, 2003

(54) NF-kappa B activating gene

(76) Inventors: Akio Matsuda, Shizuoka (JP); Goichi Honda, Shizuoka (JP); Shuji Muramatsu, Shizuoka (JP); Yukiko Nagano, Shizuoka (JP)

Correspondence Address: BIRCH STEWART KOLASCH & BIRCH, PO BOX 747, FALLS CHURCH, VA, 22040-0747, US

(21) Appl. No.: 10/042,211

(22) Filed: Jan. 7, 2002

Related U.S. Application Data
(63) Continuation of application No. PCT/JP01/11389, filed on Dec. 25, 2001.
(63) Continuation-in-part of application No. 10/024,298, filed on Dec. 21, 2001.
(60) Provisional application No. 60/258,315, filed on Dec. 28, 2000.
(60) Provisional application No. 60/278,640, filed on Mar. 26, 2001.
(60) Provisional application No. 60/314,385, filed on Aug. 24, 2001.

(30) Foreign Application Priority Data
Dec. 28, 2000 (JP) 402288/2000
Mar. 26, 2001 (JP) 088912/2001
Aug. 24, 2001 (JP) 254018/2001

(51) Int. Cl. G01N 33/53

(52) U.S. Cl. 435/7.1

(57) ABSTRACT

Provided are proteins having NF-κB activity, which are used for diagnosing, treating or preventing diseases associated with the excessive activation or inhibition of NF-κB. Using plasmid pNFκB-Luc, cDNA encoding a protein capable of activating NF-κB has been cloned from a cDNA library constructed from human lung fibroblasts, and the DNA sequence and the deduced amino acid sequence determined. The protein, the DNA encoding the protein, a recombinant vector containing the DNA, and a transformant containing the recombinant vector are useful for screening a substance inhibiting or promoting NF-κB activation.

[0001] This application is a continuation of PCT/JP01/11389 that has an international filing date of Dec. 25, 2001, which designated the United States of America. This application is also a continuation-in-part of application Ser. No. 10/024,298 filed on Dec. 21, 2001, which claims priority under 35 U.S.C. §119(e) on U.S. Provisional Application Nos. 60/258,315 filed on Dec. 28, 2000, 60/278,640 filed on Mar. 26, 2001 and 60/314,385 filed on Aug. 24, 2001. This application also claims priority under 35 U.S.C. §119(a) on Japanese Application Nos. 402288/2000 filed Dec. 28, 2000; 088912/2001 filed on Mar. 26, 2001 and 254018/2001 filed on Aug. 24, 2001. The entire contents of all of the above-identified applications are hereby incorporated by reference.

### TECHNICAL FIELD

[0002] The present invention relates to a protein capable of activating NF-κB, a DNA sequence encoding the protein, a method for obtaining the DNA, a recombinant vector containing the DNA, a transformant containing the recombinant vector, and an antibody which specifically reacts with the protein. The present invention also relates to use of the protein, DNA molecule or antibody of the invention in the diagnosis, treatment or prevention of diseases associated with the excessive activation or inhibition of NF-κB.

[0003] The present invention also relates to a method for screening a substance capable of inhibiting or promoting NF-κB activation by using the protein, DNA, recombinant vector and transformant.

### BACKGROUND ART

[0004] The transcription factor NF-κB (nuclear factor kappa B) plays an important role in the transcriptional regulation of various genes involved in inflammation and immunological reactions. NF-κB is a homo- or heterodimer protein which belongs to the Rel family. In unstimulated conditions, NF-κB normally resides in the cytoplasm as an inactive form by forming a complex with an IκB inhibitory protein (Inhibitor of NF-κB) to mask the nuclear transport signal of NF-κB.

[0005] When cytokines such as interleukin (IL)-1 and tumor necrosis factor (TNF)-α stimulate cells, IκB is phosphorylated by IKK (IκB kinase) and degraded by the 26S proteasome through ubiquitination. The released NF-κB moves to the nucleus, where it binds to the DNA sequence called the NF-κB binding sequence and induces the transcription of the gene, which is under control of NF-κB is believed to regulate the expression of genes such as those for immunoglobulins, inflammatory cytokines (e.g., IL-1 and TNF-α), interferons and cell adhesion factors. NF-κB is involved in inflammation and immune responses through the expression induction of these genes.

[0006] The inhibition of the function or activation of NF-κB may inhibit the expression of many factors (proteins) involved in inflammatory or immunological diseases or other diseases such as tumor proliferation. Thus, NF-κB is a promising target for medicaments against diseases caused or characterized by autoimmunity or inflammation [see e.g., Clinical Chemistry 45, 7-17 (1999); J Clin. Pharmacol. 38, 981-993 (1998); Gut 43, 856-860 (1998); The New England Journal of Medicine 366, 1066-1071 (1997); TiPS 46-50 (1997); The FASEB Journal 9, 899-909 (1995); Nature 395, 225-226 (1998); Science 278, 818-819 (1997); Cell 91, 299-302 (1997)].

[0007] Extracellular information is converted into a certain signal, which passes through the cell membrane and goes through the cytoplasm to the nucleus, where it regulates the expression of the target gene and causes cell responses. Therefore the elucidation of the mechanism of intracellular signal transduction from extracellular stimuli to NF-κB activation is of very important significance, because it provides very important means of developing new medicaments or therapies against autoimmune diseases and diseases exhibiting inflammatory symptoms.

[0008] It is believed that the signal transduction pathway from certain cell stimulation to NF-κB activation includes many steps mediated by various transmitters such as protein kinases. Therefore it is desirable for more efficient drug discovery to identify the transmitters which play a key role in the pathway, and to focus research on the transmitters to establish a new drug-screening method. Some signaling molecules involved in NF-κB activation have been identified [e.g., IKK, ubiquitination enzymes and the 26S proteasome described above, as well as TNF receptor associated factor 2 (TRAF2) and NF-κB inducing kinase (NIK)]. However, most of the mechanism of NF-κB activation remains unknown, and it has been desired new signaling molecules to be identified and further the NF-κB activation mechanism to be elucidated.

### DISCLOSURE OF THE INVENTION

[0009] The object of the present invention is to identify a new gene and protein capable of directly, or indirectly, activating NF-κB, and to provide a method of use of them in medicaments, diagnostics and therapy. That is, the present invention provides a new protein capable of activating NF-κB, a DNA sequence encoding the protein, a recombinant vector containing the DNA, a transformant containing the recombinant vector, a process for producing the protein, an antibody directed against the protein or a peptide fragment thereof, and a process for producing the antibody.

[0010] The present invention also provides a method for screening a substance capable of inhibiting or promoting NF-κB activation, a kit for the screening, a substance capable of inhibiting or promoting NF-κB activation obtainable by the screening method or the screening kit, a process for producing the substance, a pharmaceutical composition containing a substance capable of inhibiting or promoting NF-κB activation, etc.

[0011] Recently, random analysis of cDNA molecules has been intensively carried out to analyze various genes, which are expressed in vivo. The cDNA fragments thus obtained have been entered for databases and published as ESTs (Expressed Sequence Tags, e.g., http//www.ncbi.nlm.nih.gov/dbEST). However, ESTs are merely sequence information, and it is difficult to predict their functions. ESTs are also arranged in UniGene (http//www.ncbi.nlm.nih.gov/UniGene), and about 92,000 clusters have been registered until now. However, most of these ESTs have their 5′ end nucleotide sequences deleted, and contain no translation initiation site. Therefore it is unlikely that such analysis will directly lead to gene functional analysis such as the analysis of protein functions on the assumption of the determination of mRNA coding regions and the understanding of gene expression control by the analysis of promoters.

[0012] On the other hand, one method to elucidate functions of gene products (i.e., proteins) is transient expression cloning method using animal cells [see e.g., “Idenshi Kougaku Handbook (Genetic Engineering Handbook)”, an extra issue of “Jikken Igaku (Experimental Medicine)”, YODOSHA CO., LTD.]. This method involves transfecting animal cells with a cDNA library constructed using an animal cell expression vector to directly express a functional protein, and identifying and cloning the cDNA based on the biological activity of the protein having an effect on the cells. This method requires no chemical information (amino acid sequences and molecular weights) regarding the target protein product as a prerequisite, and allows the identification of cDNA clones by detecting specific biological activity of the protein expressed in the cells or culture.

[0013] For the efficient expression cloning, there is a need to devise a method of preparing a cDNA library. Several methods have been widely used to construct cDNA libraries [e.g., the method of Gubbler-Hoffman: Gene 25 (1983); and the method of Okayama-Berg: Mol. Cell. Biol. 2 (1982)]. However, most of the cDNA molecules prepared by these methods have their 5′ end nucleotide sequences deleted, and thus these methods rarely produce full-length cDNA, a complete DNA copy of mRNA. This is because the reverse transcriptase used to prepare cDNA from mRNA does not necessarily have high efficiency in producing full-length cDNA. Therefore it is necessary to improve these prior art methods in order to efficiently carry out the above expression cloning.

[0014] In addition, in order to carry out the functional analysis of genes, it is essential to clone full-length cDNA sequences and express proteins from them. Therefore, it has been necessary to construct cDNA libraries containing enriched full-length cDNA for efficient expression cloning.

[0015] The present inventors have intensively studied to solve the above problems. As a result, the present inventors have succeeded in constructing a full-length cDNA library by using the oligo-capping method; establishing a gene function assay system by expression cloning using 293-EBNA cells; and isolating a new DNA (cDNA) encoding a protein having a function of activating NF-κB by using the assay system. This new DNA molecule induced NF-κB activation by its expression in 293-EBNA cells. This result shows that this new DNA is a signal transduction molecule involved in NF-κB activation. Thus, the present invention has been completed.

[0016] That is, the present invention relates to:

[0017] (1) A purified protein selected from the group consisting of:

[0018] (a) a protein that activates NF-κB which consists of an amino acid sequence represented by any one of SEQ ID NOS: 1, 3, 5, 7, 9, 11, 13, 15, 17, 19, 21, 23, 25, 27, 29, 31, 33, 35, 37, 39, 41, 43, 45, 47, 49, 51, 53, 55, 57, 59, 61, 63, 65, 67, 69, 71, 73, 75, 77, 79, 81, 83, 85, 87, 89, 91, 93, 95, 97, 99, 101, 103, 105, 107, 109, 111, 113, 115, 117, 119, 121, 123, 125, 127, 129, 131, 133, 135, 137, 139, 141, 143, 145, 147, 149, 152, 154, 156, 158, 160, 162, 164, 166, 168, 170, 172, 174, 176, 178, and 180; and

[0019] (b) a protein that activates NF-κB and consists of an amino acid sequence having at least one amino acid deletion, substitution or addition in an amino acid sequence represented by any one of SEQ ID NOS: 1, 3, 5, 7, 9, 11, 13, 15, 17, 19, 21, 23, 25, 27, 29, 31, 33, 35, 37, 39, 41, 43, 45, 47, 49, 51, 53, 55, 57, 59, 61, 63, 65, 67, 69, 71, 73, 75, 77, 79, 81, 83, 85, 87, 89,91, 93, 95, 97, 99, 101, 103, 105, 107, 109, 111, 113, 115, 117, 119, 121, 123, 125, 127, 129, 131, 133, 135, 137, 139, 141, 143, 145, 147, 149, 152, 154, 156, 158, 160, 162, 164, 166, 168, 170, 172, 174, 176, 178 and 180.

[0020] (2) A purified protein that activates NF-κB and comprises an amino acid sequence having at least 50% identity to the protein according to above item (1) over the entire length thereof.

[0021] (3) An isolated polynucleotide which comprises a nucleotide sequence encoding a protein selected from the group consisting of:

[0022] (a) a protein which comprises an amino acid sequence represented by any one of SEQ ID NOS: 1, 3, 5, 7, 9, 11, 13, 15, 17, 19, 21, 23, 25, 27, 29, 31, 33, 35, 37, 39, 41, 43, 45, 47, 49, 51, 53, 55, 57, 59, 61, 63, 65, 67, 69, 71, 73, 75, 77, 79, 81, 83, 85, 87, 89, 91, 93, 95, 97, 99, 101, 103, 105, 107, 109, 111, 113, 115, 117, 119, 121, 123, 125, 127, 129, 131, 133, 135, 137, 139, 141, 143, 145, 147, 149, 152, 154, 156, 158, 160, 162, 164, 166, 168, 170, 172, 174, 176, 178 and 180; and

[0023] (b) a protein that activates NF-κB and consists of an amino acid sequence having at least one amino acid deletion, substitution or addition in an amino acid sequence represented by any one of SEQ ID NOS: 1, 3, 5, 7, 9, 11, 13, 15, 17, 19, 21, 23, 25, 27, 29, 31, 33, 35, 37, 39, 41, 43, 45, 47, 49, 51, 53, 55, 57, 59, 61, 63, 65, 67, 69, 71, 73, 75, 77, 79, 81, 83, 85, 87, 89, 91, 93, 95, 97, 99, 101, 103, 105, 107, 109, 111, 113, 115, 117, 119, 121, 123, 125, 127, 129, 131, 133, 135, 137, 139, 141, 143, 145, 147, 149, 152, 154, 156, 158, 160, 162, 164, 166, 168, 170, 172, 174, 176, 178 and 180.

[0024] (4) An isolated polynucleotide comprising a polynucleotide sequence selected from the group consisting of:

[0025] (a) a polynucleotide sequence represented by any one of SEQ ID NOS: 2, 4, 6, 8, 10, 12, 14, 16, 18, 20, 22, 24, 26, 28, 30, 32, 34, 36, 38, 40, 42, 44, 46, 48, 50, 52, 54, 56, 58, 60, 62, 64, 66, 68, 70, 72, 74, 76, 78, 80, 82, 84, 86, 88, 90, 92, 94, 96, 98, 100, 102, 104, 106, 108, 110, 112, 114, 116, 118, 120, 122, 124, 126, 128, 130, 132, 134, 136, 138, 140, 142, 144, 146, 148, 150, 151, 153, 155, 157, 159, 161, 163, 165, 167, 169, 171, 173, 175, 177 and 179;

[0026] (b) a polynucleotide sequence encoding a protein that activates NF-κB and hybridizing under stringent conditions with a polynucleotide having a polynucleotide sequence complementary to the polynucleotide sequence of (a); and

[0027] (c) a polynucleotide sequence which encodes a protein that activates NF-κB and consists of a polynucleotide sequence having at least one nucleotide deletion, substitution or addition in a polynucleotide sequence represented by any one of SEQ ID NOS: 2, 4, 6, 8, 10, 12, 14, 16, 18, 20, 22, 24, 26, 28, 30, 32, 34, 36, 38, 40, 42, 44, 46, 48, 50, 52, 54, 56, 58, 60, 62, 64, 66, 68, 70, 72, 74, 76, 78, 80, 82, 84, 86, 88, 90, 92, 94, 96, 98, 100, 102, 104, 106, 108, 110, 112, 114, 116, 118, 120, 122, 124, 126, 128, 130, 132, 134, 136, 138, 140, 142, 144, 146, 148, 150, 151, 153, 155, 157, 159, 161, 163, 165, 167, 169, 171, 173, 175, 177 and 179.

[0028] (5) An isolated polynucleotide comprising a nucleotide sequence which encodes a protein that activates NF-κB and has at least 95% identity to the polynucleotide sequence according to above item (3) over the entire length thereof.

[0029] (6) An isolated polynucleotide comprising a nucleotide sequence which encodes a protein that activates NF-κB and has at least 95% identity to the polynucleotide sequence according to above item (4) over the entire length thereof.

[0030] (7) A purified protein encoded by the polynucleotide according to any one of above items (3) to (6).

[0031] (8) A recombinant vector which comprises a polynucleotide according to any one of above items (3) to (6).

[0032] (9) A transformed cell which comprises the recombinant vector according to above item (8).

[0033] (10) A membrane of the cell according to above item (9), when the protein according to above item (1) or (2) is a membrane protein.

[0034] (11) A process for producing a protein comprising,

[0035] (a) culturing a transformed cell comprising the isolated polynucleotide according to any one of items (3) to (6) under conditions providing expression of the encoded protein; and

[0036] (b) recovering the protein from the culture.

[0037] (12) A process for diagnosing a disease or a susceptibility to a disease in a subject related to expression or activity of the protein according to above item (1), (2) or (7) in a subject comprising:

[0038] (a) determining the presence or absence of a mutation in the nucleotide sequence encoding said protein in the genome of said subject; and/or

[0039] (b) analyzing the amount of expression of said protein in a sample derived from said subject. In the above-described method, a diagnosis of disease is preferably made when the amount of the protein expressed is 2-fold or higher than normal, or half or less than normal.

[0040] (13) A method for screening a compound in respect of activity to inhibit or promote NF-κB activation, which comprises the steps of:

[0041] (a) providing a cell with a gene encoding a protein that activates NF-κB, and a component that provides a detectable signal associated with activation of NF-κB;

[0042] (b) culturing a transformed cell under conditions, which permit the expression of the gene in the transformed cell;

[0043] (c) contacting the transformed cell with one or more compounds;

[0044] (d) measuring the detectable signal; and

[0045] (e) isolating or identifying an activator compound and/or an inhibitor compound by measuring the detectable signal.

[0046] Further, it is preferable to isolate or identify as an activator compound, a compound that increases said detectable signal 2-fold or higher than normal, and to isolate or identify as an inhibitor compound, a compound that decreases said detectable signal half or less than normal.

[0047] (14) A process for producing a pharmaceutical composition, which comprises the steps of:

[0048] (a) providing a cell with a gene encoding a protein that activates NF-κB, and a component capable of providing a detectable signal;

[0049] (b) culturing a transformed cell under conditions, which permit the expression of the gene in the transformed cell;

[0050] (c) contacting the transformed cell with one or more candidate compounds;

[0051] (d) measuring the detectable signal;

[0052] (e) isolating or identifying an activator compound and/or an inhibitor compound by measuring the detectable signal; and

[0053] (f) optimizing the isolated or identified compound as a pharmaceutical composition.

[0054] Further, it is preferable to isolate or identify as an activator compound, a compound that increases said detectable signal 2-fold or higher than normal, and to isolate or identify as an inhibitor compound, a compound that decreases said detectable signal half or less than normal.

[0055] (15) A kit for screening a compound in respect of activity to inhibit or promote NF-κB activation, which comprises:

[0056] (a) a cell comprising a gene encoding a protein that activates NF-κB, and a component that provides a detectable signal upon activation of NF-κB; and

[0057] (b) reagents for measuring the detectable signal.

[0058] (16) A monoclonal or polyclonal antibody that specifically binds to the protein according to above item (1), (2) or (7).

[0059] (17) A process for producing a monoclonal or polyclonal antibody according to above item that specifically binds to the protein of above item (1),(2) or (7), which comprises administering the protein according to above item (1), (2) or (7) as an antigen or epitope-bearing fragments to a non-human animal.

[0060] (18) An antisense oligonucleotide complementary to the polynucleotide according to any one of above items (3) to (6),which prevents NF-κB activator protein expression.

[0061] (19) A ribozyme which inhibits NF-κB activation by cleavage of RNA that encodes the protein of above item (1), (2) or (7).

[0062] (20) A method for treating a disease, which comprises administering to a subject an amount of a compound screened by the process according to above item (13), and/or a monoclonal or polyclonal antibody according to above item (16), and/or an antisense oligonucleotide according to above item (18), and/or a ribozyme according to above item (19) effective to treat a disease selected from the group consisting of inflammation, autoimmune diseases, infectious diseases, cancers and bone diseases.

[0063] (21) A pharmaceutical composition produced according to the process of item (14) as an inhibitor or promoter of NF-κB activation.

[0064] (22) A pharmaceutical composition according to item (21) for the treatment of inflammation, autoimmune diseases, cancers, infectious diseases, bone diseases, AIDS, neurodegenerative diseases, or ischemic disorders.

[0065] (23) A method of treating inflammation, autoimmune diseases, cancers, infectious diseases, bone diseases, AIDS, neurodegenerative diseases, or ischemic disorders, which comprises administering a pharmaceutical composition produced according to the process of above item (14) to a patient suffering from a disease associated with NF-κB.

[0066] (24) A pharmaceutical composition which comprises a monoclonal or polyclonal antibody according to item (16) as an active ingredient.

[0067] (25) A pharmaceutical composition which comprises an antisense oligonucleotide according to item (18) as an active ingredient.

[0068] (26) The pharmaceutical composition according to item (24) or (25), wherein the target disease is selected from the group consisting of inflammation, autoimmune diseases, infectious diseases, cancers, bone diseases, AIDS, neurodegenerative diseases and ischemic disorders.

[0069] (27) A method for obtaining a novel gene having a function,

[0070] which comprises at least the following steps:

[0071] (a) constructing a full-length cDNA library by the oligo-capping method;

[0072] (b) cotransfecting the full-length cDNA and a plasmid containing a factor emitting a signal indicative of the presence of a protein having the function into cells; and

[0073] (c) selecting a plasmid emitting the signal.

[0074] It should be noted that a novel gene having a function according to the present invention refers to, for example, a nucleic acid molecule encoding a protein having biological function.

[0075] (28) A computer-readable medium on which a sequence data set has been stored, said sequence data set comprising at least one nucleotide sequence selected from the group consisting of SEQ ID NOS: 2, 4, 6, 8, 10, 12, 14, 16, 18, 20, 22, 24, 26, 28, 30, 32, 34, 36, 38, 40, 42, 44, 46, 48, 50, 52, 54, 56, 58, 60, 62, 64, 66, 68, 70, 72, 74, 76, 78, 80, 82, 84, 86, 88, 90, 92, 94, 96, 98, 100, 102, 104, 106, 108, 110, 112, 114, 116, 118, 120, 122, 124, 126, 128, 130, 132, 134, 136, 138, 140, 142, 144, 146, 148, 150, 151, 153, 155, 157, 159, 161, 163, 165, 167, 169, 171, 173, 175, 177 and 179, and/or at least one amino acid sequence selected from the group consisting of SEQ ID NOS: 1, 3, 5, 7, 9, 11, 13, 15, 17, 19, 21, 23, 25, 27, 29, 31, 33, 35, 37, 39, 41, 43, 45, 47, 49, 51, 53, 55, 57, 59, 61, 63, 65, 67, 69, 71, 73, 75, 77, 79, 81, 83, 85, 87, 89, 91, 93, 95, 97, 99, 101, 103, 105, 107, 109, 111, 113, 115, 117, 119, 121, 123, 125, 127, 129, 131, 133, 135, 137, 139, 141, 143, 145, 147, 149, 152, 154, 156, 158, 160, 162, 164, 166, 168, 170, 172, 174, 176, 178 and 180.

[0076] (29) A method for calculating identity to other nucleotide sequences and/or amino acid sequences, which comprises comparing data on a medium according to above item (28) with data of said other nucleotide sequences and/or amino acid sequences.

[0077] (30) An insoluble substrate to which polynucleotide comprising all or part of the nucleotide sequences selected from the group consisting of SEQ ID NOS: 2, 4, 6, 8, 10, 12, 14, 16, 18, 20, 22, 24, 26, 28, 30, 32, 34, 36, 38, 40, 42, 44, 46, 48, 50, 52, 54, 56, 58, 60, 62, 64, 66, 68, 70, 72, 74, 76, 78, 80, 82, 84, 86, 88 and 90, 92, 94, 96, 98, 100, 102, 104, 106, 108, 110, 112, 114, 116, 118, 120, 122, 124, 126, 128, 130, 132, 134, 136, 138, 140, 142, 144, 146, 148, 150, 151, 153, 155, 157, 159, 161, 163, 165, 167, 169, 171, 173, 175, 177 and 179, are fixed.

[0078] (31) An insoluble substrate to which polypeptides comprising all or a part of the amino acid sequences selected from the group consisting of SEQ ID NOS: 1, 3, 5, 7, 9, 11, 13, 15, 17, 19, 21, 23, 25, 27, 29, 31, 33, 35, 37, 39, 41, 43, 45, 47, 49, 51, 53, 55, 57, 59, 61, 63, 65, 67, 69, 71, 73, 75, 77, 79, 81, 83, 85, 87, 89, 91, 93, 95, 97, 99, 101, 103, 105, 107, 109, 111, 113, 115, 117, 119, 121, 123, 125, 127, 129, 131, 133, 135, 137, 139, 141, 143, 145, 147, 149, 152, 154, 156, 158, 160, 162, 164, 166, 168, 170, 172, 174, 176, 178 and 180, are fixed.

[0079] The contents of the specficiations and/or drawings of Japanese Patent Applications Nos. 2000-402288, 2001-088912 and 2001-254018, and U.S. Provisional Applications Nos. 60/258,315, 60/278,640 and 60/314,385, which from the bases of priority of the instant application, are incorporated herein.

### BRIEF DESCRIPTION OF THE DRAWINGS

[0080] FIG. 1 is a graph showing NF-κB reporter activity inhibition by the proteasome inhibitor MG-132 (SEQ ID NO: 5) in Example 3, the axis of abscissa is MG-132 concentration and the transversal axis is relative luciferase activity where relative luciferase activity is taken as 100% under conditions of non-addition of MG-132 (0 μM). (Relative luciferase activity at various concentrations was divided by relative luciferase activity under conditions of non-addition of MG-132, and expressed as a percentage.)

[0081] FIG. 2 is a graph showing NF-κB reporter activity inhibition by the proteasome inhibitor MG-132 (SEQ ID NO: 9) in Example 3.

[0082] FIG. 3 is a graph showing NF-κB reporter activity inhibition by the proteasome inhibitor MG-132 (SEQ ID NO: 17) in Example 3.

[0083] FIG. 4 is a graph showing NF-κB reporter activity inhibition by the proteasome inhibitor MG-132 (SEQ ID NO: 21) in Example 3.

[0084] FIG. 5 is a graph showing NF-κB reporter activity inhibition by the proteasome inhibitor MG-132 (SEQ ID NO: 35) in Example 3.

[0085] FIG. 6 is a graph showing NF-κB reporter activity inhibition by the proteasome inhibitor MG-132 (SEQ ID NO: 37) in Example 3.

[0086] FIG. 7 is a graph showing NF-κB reporter activity inhibition by the proteasome inhibitor MG-132 (SEQ ID NO: 41) in Example 3.

[0087] FIG. 8 is a graph showing NF-κB reporter activity inhibition by the proteasome inhibitor MG-132 (SEQ ID NO: 53) in Example 3.

[0088] FIG. 9 is a graph showing NF-κB reporter activity inhibition by the proteasome inhibitor MG-132 (SEQ ID NO: 57) in Example 3.

[0089] FIG. 10 is a graph showing NF-κB reporter activity inhibition by the proteasome inhibitor MG-132 (SEQ ID NO: 63) in Example 3.

[0090] FIG. 11 is a graph showing NF-κB reporter activity inhibition by the proteasome inhibitor MG-132 (SEQ ID NO: 67) in Example 3.

[0091] FIG. 12 is a graph showing NF-κB reporter activity inhibition by the proteasome inhibitor MG-132 (SEQ ID NO: 71) in Example 3.

[0092] FIG. 13 is a graph showing NF-κB reporter activity inhibition by the proteasome inhibitor MG-132 (SEQ ID NO: 75) in Example 3.

[0093] FIG. 14 is a graph showing NF-κB reporter activity inhibition by the proteasome inhibitor MG-132 (SEQ ID NO: 81) in Example 3.

[0094] FIG. 15 is a graph showing NF-κB reporter activity inhibition by the proteasome inhibitor MG-132 (SEQ ID NO: 87) in Example 3.

[0095] FIG. 16 is a graph showing NF-κB reporter activity inhibition by the proteasome inhibitor MG-132 (SEQ ID NO: 91) in Example 3.

[0096] FIG. 17 is a graph showing NF-κB reporter activity inhibition by the proteasome inhibitor MG-132 (SEQ ID NO: 93) in Example 3.

[0097] FIG. 18 is a graph showing NF-κB reporter activity inhibition by the proteasome inhibitor MG-132 (SEQ ID NO: 97) in Example 3.

[0098] FIG. 19 is a graph showing NF-κB reporter activity inhibition by the proteasome inhibitor MG-132 (SEQ ID NO: 121) in Example 3.

[0099] FIG. 20 is a graph showing NF-κB reporter activity inhibition by the proteasome inhibitor MG-132 (SEQ ID NO: 123) in Example 3.

[0100] FIG. 21 is a graph showing NF-κB reporter activity inhibition by the proteasome inhibitor MG-132 (SEQ ID NO: 129) in Example 3.

[0101] FIG. 22 is a graph showing NF-κB reporter activity inhibition by the proteasome inhibitor MG-132 (SEQ ID NO: 154) in Example 3.

[0102] FIG. 23 is a graph showing NF-κB reporter activity inhibition by the proteasome inhibitor MG-132 (SEQ ID NO: 158) in Example 3.

[0103] FIG. 24 is a graph showing NF-κB reporter activity inhibition by the proteasome inhibitor MG-132 (SEQ ID NO: 162) in Example 3.

[0104] FIG. 25 is a graph showing NF-κB reporter activity inhibition by the proteasome inhibitor MG-132 (SEQ ID NO: 168) in Example 3.

[0105] FIG. 26 is a graph showing NF-κB reporter activity inhibition by the proteasome inhibitor MG-132 (SEQ ID NO: 170) in Example 3.

[0106] FIG. 27 is a graph showing NF-κB reporter activity inhibition by the proteasome inhibitor MG-132 (SEQ ID NO: 172) in Example 3.

[0107] FIG. 28 is a graph showing NF-κB reporter activity inhibition by the proteasome inhibitor MG-132 (SEQ ID NO: 176) in Example 3.

[0108] FIG. 29 is a graph showing NF-κB reporter activity inhibition by the proteasome inhibitor MG-132 (SEQ ID NO: 178) in Example 3.

[0109] Explanation of the Sequence Listing

[0110] SEQ ID NO: 181 is a primer.

[0111] SEQ ID NO: 182 is a primer.

### BEST MODE FOR CARRYING OUT THE INVENTION

[0112] At first, in order to further clarify the basic feature of the present invention, the present invention is explained by following how the present invention is completed. In order to obtain a new gene having a function of activating NF-κB, the following experiments were carried out as shown in the examples. First, using the oligo-capping method, a full-length cDNA was produced from mRNA prepared from normal human lung fibroblasts (purchased from Sanko Junyaku Co., Ltd.), and a full-length cDNA library was constructed in which the cDNA was inserted into the vector pME18S-FL3 (GenBank Accession AB009864). Next, the cDNA library was introduced into E. coli cells, and plasmid preparation was carried out per clone. Then, the pNKκB-Luc reporter plasmid (STRATAGENE) containing a DNA encoding luciferase under control of a promoter activated by NF-κB and the above full-length cDNA plasmid were cotransfected into 293-EBNA cells (Invitrogen). After 24 or 48 hours of culture, luciferase activity was measured, and the plasmid with significantly increased luciferase activity compared to that of a control experiment (vector pME18S-FL3 is introduced into a cell in place of a full-length cDNA) was selected (the selected plasmid showed a 5-fold or more increase in luciferase activity compared to that of the control experiment), and the entire nucleotide sequence of the cDNA cloned into the plasmid was determined. The protein encoded by the cDNA thus obtained shows that this protein is a signal transduction molecule involved in NF-κB activation.

[0113] The present invention is described in detail below.

[0114] In the present invention, activation of NF-κB refers to direct or indirect activation of NF-κB (including induction of NF-κB activation) when a gene is introduced into a suitable cell and the protein encoded by the gene is excessively expressed. Activation of NF-κB can be measured, for example, by an assay using an NF-κB dependant reporter gene. In the assay, activation may be reflected by increasing the reporter activity compared to control cells (cells into which the vector only was introduced). Increase in reporter activity is preferably by a factor of 1.5 or more, more preferably by a factor of 2 or more, and still more preferably by a factor of 5 or more.

[0115] Reporter activity can be measured by cloning a polynucleotide (e.g. cDNA) encoding the protein to be expressed into a suitable expression vector, co-transfecting the expression vector and an NF-κB dependant reporter plasmid into a suitable cell, and after culturing for a certain period, then measuring reporter activity. Suitable expression vectors are well known to those skilled in the art, examples of which include pME18S-FL3, pcDNA3.1 (Invitrogen). The reporter gene can be one which enables a person skilled in the art to easily detect the expression thereof, and examples include a gene encoding luciferase, chloramphenicol acetyl transferase, or β-galactosidase. Use of a gene encoding luciferase is most preferable, and examples of an NF-κB dependent reporter plasmid include pNF-κB-Luc (STRATAGENE). Suitable cells include cells which exhibit an NF-κB activation response to stimulation by IL- 1, TNF-α and the like. Examples include 293-EBNA cells. Cell culture and introduction of genes into cells (transfection) can be performed and optimized by a person skilled in the art by known techniques.

[0116] As a preferable method, 293-EBNA cells are inoculated on 5% FBS (Fetal Bovine Serum) containing DMEM medium (Dulbecco's Modified Eagle Medium) in a 96-well cell culture plate to a final cell density of 1×10⁴ cells/well, and cultured for 24 hours at 37° C. in the presence of 5% CO₂. Then, reporter plasmid pNF-κB-Luc (STRATAGENE) and the expression vector are cotransfected into the cells in a well using FuGENE 6 (Roche). After 24 hours of culture at 37° C., NF-κB activation is then measured by measuring luciferase activity using a long term luciferase assay system, Picagene LT2.0 (Toyo Ink Mfg). For example, luciferase activity can be measured using PerkinElmer's Wallac ARVOTMST 1420 MULTILABEL COUNTER. The method for gene introduction by FuGENE6, and measurement of luciferase activity by Picagene LT2.0 can be performed respectively according to the attached protocols. In a method of gene introduction with a 96-well plate using FuGENE6, the amount of FuGENE6 per 1 well is suitably 0.3 to 0.5 μl, preferably 0.3 μl; the amount of pNF-κB-Luc plasmid is suitably 50 to 100 ng, preferably 50 ng; the amount of expression vector is suitably 50-100 ng, and preferably 100 ng. An ability to activate NF-κB refers to an ability to increase the reporter activity (luciferase activity) relative to the control experiment (cells into which only a null vector was introduced). Increase in reporter activity is preferably by a factor of 1.5 or more, more preferably by a factor of 2 or more, and still more preferably by a factor of 5 or more.

[0117] Related to the amino acid sequences of any one of SEQ ID NOS. 1, 3, 5, 7, 9, 11, 13, 15, 17, 19, 21, 23, 25, 27, 29, 31, 33, 35, 37, 39, 41, 43, 45, 47, 49, 51, 53, 55, 57, 59, 61, 63, 65, 67, 69, 71, 73, 75, 77, 79, 81, 83, 85, 87, 89, 91, 93, 95, 97, 99, 101, 103, 105, 107, 109, 111, 113, 115, 117, 119, 121, 123, 125, 127, 129, 131, 133, 135, 137, 139, 141, 143, 145, 147, 149, 152, 154, 156, 158, 160, 162, 164, 166, 168, 170, 172, 174, 176, 178 and 180, the present invention provides for a protein that:

[0118] (a) comprises one of the above amino acid sequences;

[0119] (b) is a peptide having one of the above amino acid sequences;

[0120] (c) activates NF-κB and consists of an amino acid sequence having at least one amino acid deletion, substitution or addition in the above amino acid sequences;

[0121] (d) comprises an amino acid sequence, which has at least 95% identity, preferably at least 97-99% identity, to an amino acid sequence of SEQ ID NO: 1, 3, 5, 7, 9, 11, 13, 15, 17, 19, 21, 23, 25, 27, 29, 31, 33, 35, 37, 39, 41, 43, 45, 47, 49, 51, 53, 55, 57, 59, 61, 63, 65, 67, 69, 71, 73, 75, 77, 79, 81, 83, 85, 87, 89, 91, 93, 95, 97, 99, 101, 103, 105, 107, 109, 111, 113, 115, 117, 119, 121, 123, 125, 127, 129, 131, 133, 135, 137, 139, 141, 143, 145, 147, 149, 152, 154, 156, 158, 160, 162, 164, 166, 168, 170, 172, 174, 176, 178 or 180, over the entire length thereof.

[0122] “Identity” as known in the art, is a relationship between two or more protein sequence or two or more polynucleotide sequences, as determined by comparing the sequences. In the art, “identity” also means the degree of sequence relatedness between protein or polynucleotide sequences, as determined by the match between protein or polynucleotide sequences, as the case may be, as determined by the match between strings of such sequences. “Identity” and “similarity” can be readily calculated by known methods. Preferred methods to determine identity are designed to give the largest match between the sequences tested. Methods to determine identity and similarity are codified in publicly available computer programs. “Identity” can be determined by using the BLAST program (for example, Altschul S F, Gish W, Miller W, Myers E W, Lipman D J., J. Mol. Biol., 215: p403-410 (1990), Altschul S F, Madden T L, Schaffer A A, Zhang Z, Miller W, Lipman D J,. Nucleic Acids Res. 25: p3389-3402 (1997)). Where software such as BLAST is used, it is preferable to use default values. The main initial conditions generally used in a BLAST search are as follows, but are not limited to these.

[0123] An amino acid substitution matrix is a matrix numerically representing the degree of analogy of each pairing of each of the 20 types of amino acid, and normally the default matrix of BLOSUM62 is used. The theory of this amino acid substitution matrix is shown in Altschul S. F., J. Mol. Biol. 219: 555-565 (1991), and applicability to DNA sequence comparison is shown on States D. J., Gish W., Altschul S. F., Methods, 3: 66-70 (1991). In this case, optimal gap cost is determined by experience and in the case of BLOSUM62 preferably parameters of Existence 11, Extension 1 are used. The expected value (EXPECT) is the threshold value concerning statistical significance for a match with a database sequence, and the default value is 10.

[0124] As one example, a protein having, for example, 95% or more identity to the amino acid sequence of SEQ ID NO: 2 may contain in the amino acid sequence up to 5 amino acid changes per 100 amino acids of the amino acid sequence of SEQ ID NO: 2. In other words, a protein having 95% or more amino acid sequence identity to a subject amino acid sequence, may have amino acids up to 5% of the total number of amino acids within the subject sequence, deleted or substituted by other amino acids, or amino acids up to 5% of the total number of amino acids within the subject sequence may be inserted within the subject sequence. These changes within the subject sequence, may exist at the amino terminus or the carboxy terminus of the subject sequence, or may exist at any position between these termini, or may form one or more groups of changes.

[0125] The Examples described below demonstrate that the protein consisting of an amino acid sequence of any one of the above SEQ ID NO: 1, 3, 5, 7, 9, 11, 13, 15, 17, 19, 21, 23, 25, 27, 29, 31, 33, 35, 37, 39, 41, 43, 45, 47, 49, 51, 53, 55, 57, 59, 61, 63, 65, 67, 69, 71, 73, 75, 77, 79, 81, 83, 85, 87, 89, 91, 93, 95, 97, 99, 101, 103, 105, 107, 109, 111, 113, 115, 117, 119, 121, 123, 125, 127, 129, 131, 133, 135, 137, 139, 141, 143, 145, 147, 149, 152, 154, 156, 158, 160, 162, 164, 166, 168, 170, 172, 174, 176, 178 and 180, is capable of activating NF-κB.

[0126] Related to the polynucleotide sequence of any one of SEQ ID NOS: 2, 4, 6, 8, 10, 12, 14, 16, 18, 20, 22, 24, 26, 28, 30, 32, 34, 36, 38, 40, 42, 44, 46, 48, 50, 52, 54, 56, 58, 60, 62, 64, 66, 68, 70, 72, 74, 76, 78, 80, 82, 84, 86, 88, 90, 92, 94, 96, 98, 100, 102, 104, 106, 108, 110, 112, 114, 116, 118, 120, 122, 124, 126, 128, 130, 132, 134, 136, 138, 140, 142, 144, 146, 148, 150, 151, 153, 155, 157, 159, 161, 163, 165, 167, 169, 171, 173, 175, 177 and 179, the present invention further provides an isolated polynucleotide that:

[0127] (a) comprises a nucleotide sequence, which has at least 95% identity, preferably at least 97-99% identity to any one of the above sequences;

[0128] (b) is a polynucleotide of any one of the above sequences; or

[0129] (c) has a nucleotide sequence encoding a protein which has at least 95% identity, preferably, at least 97-99% identity, to the amino acid sequence of any one of SEQ ID NOs: 1, 3, 5, 7, 9, 11, 13, 15, 17, 19, 21, 23, 25, 27, 29, 31, 33, 35, 37, 39, 41, 43, 45, 47, 49, 51, 53, 55, 57, 59, 61, 63, 65, 67, 69, 71, 73, 75, 77, 79, 81, 83, 85, 87, 89, 91, 93, 95, 97, 99, 101, 103, 105, 107, 109, 111, 113, 115, 117, 119, 121, 123, 125, 127, 129, 131, 133, 135, 137, 139, 141, 143, 145, 147, 149, 152, 154, 156, 158, 160, 162, 164, 166, 168, 170, 172, 174, 176, 178 and 180.

[0130] Polynucleotides which are identical or almost identical to nucleotide sequences contained in the above nucleotide sequences may be used as hybridization probes to isolate full-length cDNA and genomic clones encoding the protein of the present invention, or cDNA or genomic clones of other genes that have a high sequence similarity to the above sequences, or genomic clones, or may be used as primers for nucleic acid amplification reactions. Typically, these nucleotide sequences are 70% identical, preferably 80% identical, more preferably 90% identical, most preferably 95% identical to the above sequences. The probes or primers will generally comprises at least 15 nucleotides, preferably 30 nucleotides and may have 50 nucleotides. Particularly preferred probes will have between 30 and 50 nucleotides. Particularly preferred primers have between 20 and 25 nucleotides.

[0131] The polynucleotide of the present invention may be either in the form of a DNA such as cDNA ,a genomic DNA obtained by cloning or synthetically produced, or may be in the form of RNA such as mRNA. The polynucleotide may be single-stranded or double-stranded. The double-stranded polynucleotides may be double-stranded DNA, double-stranded RNA or DNA:RNA hybrid. The single-stranded polynucleotide may be sense strand also known as coding strand or antisense strand also known as non-coding strand.

[0132] Those skilled in the art can prepare a protein having the same NF-κB activating activity as the protein having an amino acid sequence of any one of SEQ ID NO: 1, 3, 5, 7, 9, 11, 13, 15, 17, 19, 21, 23, 25, 27, 29, 31, 33, 35, 37, 39, 41, 43, 45, 47, 49, 51, 53, 55, 57, 59, 61, 63, 65, 67, 69, 71, 73, 75, 77, 79, 81, 83, 85, 87, 89, 91, 93, 95, 97, 99, 101, 103, 105, 107, 109, 111, 113, 115, 117, 119, 121, 123, 125, 127, 129, 131, 133, 135, 137, 139, 141, 143, 145, 147, 149, 152, 154, 156, 158, 160, 162, 164, 166, 168, 170, 172, 174, 176, 178 and 180, by means of appropriate substitution of an amino acid in the protein using known methods. One such method involves using conventional mutagenesis procedures for the DNA encoding the protein. Another method is, for example, site-directed mutagenesis (e.g., Mutan-Super Express Km Kit from Takara Shuzo Co., Ltd.). Mutations of amino acids in proteins may also occur in nature. Thus, the present invention also includes a mutated protein which is capable of activating NF-κB and which has at least one amino acid deletion, substitution or addition relative to the protein of any one of SEQ ID NO: 1, 3, 5, 7, 9, 11, 13, 15, 17, 19, 21, 23, 25, 27, 29, 31, 33, 35, 37, 39, 41, 43, 45, 47, 49, 51, 53, 55, 57, 59, 61, 63, 65, 67, 69, 71, 73, 75, 77, 79, 81, 83, 85, 87, 89, 91, 93, 95, 97, 99, 101, 103, 105, 107, 109, 111, 113, 115, 117, 119, 121, 123, 125, 127, 129, 131, 133, 135, 137, 139, 141, 143, 145, 147, 149, 152, 154, 156, 158, 160, 162, 164, 166, 168, 170, 172, 174, 176, 178 and 180, and the DNA encoding the protein. The number of mutations is preferably up to 10, more preferably up to 5, most preferably up to 3.

[0133] The substitutions of amino acids are preferably conservative substitutions, specific examples of which are substitutions within the following groups: (glycine, alanine), (valine, isoleucine, leucine), (aspartic acid, glutamic acid), (asparagine, glutamine), (serine, threonine), (lysine, arginine) and (phenylalanine, tyrosine).

[0134] Based on the nucleotide sequences (e.g., SEQ ID NO: 2) encoding a protein consisting of an amino acid sequence of any one of SEQ ID NO: 1, 3, 5, 7, 9, 11, 13, 15, 17, 19, 21, 23, 25, 27, 29, 31, 33, 35, 37, 39, 41, 43, 45, 47, 49, 51, 53, 55, 57, 59, 61, 63, 65, 67, 69, 71, 73, 75, 77, 79, 81, 83, 85, 87, 89, 91, 93, 95, 97, 99, 101, 103, 105, 107, 109, 111, 113, 115, 117, 119, 121, 123, 125, 127, 129, 131, 133, 135, 137, 139, 141, 143, 145, 147, 149, 152, 154, 156, 158, 160, 162, 164, 166, 168, 170, 172, 174, 176, 178 and 180 or a fragment thereof, those skilled in the art can routinely isolate a DNA with a high sequence similarity to these nucleotide sequences by using hybridization techniques and the like, and obtain proteins having the same NF-κB activating activity as the protein having of an amino acid sequence of any one of SEQ ID NO: 1, 3, 5, 7, 9, 11, 13, 15, 17, 19, 21, 23, 25, 27, 29, 31, 33, 35, 37, 39, 41, 43, 45, 47, 49, 51, 53, 55, 57, 59, 61, 63, 65, 67, 69, 71, 73, 75, 77, 79, 81, 83, 85, 87, 89, 91, 93, 95, 97, 99, 101, 103, 105, 107, 109, 111, 113, 115, 117, 119, 121, 123, 125, 127, 129, 131, 133, 135, 137, 139, 141, 143, 145, 147, 149, 152, 154, 156, 158, 160, 162, 164, 166, 168, 170, 172, 174, 176, 178 and 180. Thus, the present invention also includes a protein that activates NF-κB and comprises an amino acid sequence having a high identity to the amino acid sequence of any one of the above SEQ ID NO: 1, 3, 5, 7, 9, 11, 13, 15, 17, 19, 21, 23, 25, 27, 29, 31, 33, 35, 37, 39, 41, 43, 45, 47, 49, 51, 53, 55, 57, 59, 61, 63, 65, 67, 69, 71, 73, 75, 77, 79, 81, 83, 85, 87, 89, 91, 93, 95, 97, 99, 101, 103, 105, 107, 109, 111, 113, 115, 117, 119, 121, 123, 125, 127, 129, 131, 133, 135, 137, 139, 141, 143, 145, 147, 149, 152, 154, 156, 158, 160, 162, 164, 166, 168, 170, 172, 174, 176, 178 and 180. “High identity” refers to an amino acid sequence having an identity of at least 90%, preferably 95%, and more preferably at least 97% over the entire length of an amino acid sequence expressed by any one of the above SEQ ID NO: 1, 3, 5, 7, 9, 11, 13, 15, 17, 19, 21, 23, 25, 27, 29, 31, 33, 35, 37, 39, 41, 43, 45, 47, 49, 51, 53, 55, 57, 59, 61, 63, 65, 67, 69, 71, 73, 75, 77, 79, 81, 83, 85, 87, 89, 91, 93, 95, 97, 99, 101, 103, 105, 107, 109, 111, 113, 115, 117, 119, 121, 123, 125, 127, 129, 131, 133, 135, 137, 139, 141, 143, 145, 147, 149, 152, 154, 156, 158, 160, 162, 164, 166, 168, 170, 172, 174, 176, 178 and 180. The proteins of the present invention may be natural proteins derived from any human or animal cells or tissues, chemically synthesized proteins, or proteins obtained by genetic recombination techniques. The protein may or may not be subjected to post-translational modifications such as sugar chain addition or phosphorylation.

[0135] The present invention also includes a polynucleotide encoding the above protein of the present invention. Examples of nucleotide sequences encoding a protein consisting of an amino acid sequence of any one of SEQ ID NOS: 1, 3, 5, 7, 9, 11, 13, 15, 17, 19, 21, 23, 25, 27, 29, 31, 33, 35, 37, 39, 41, 43, 45, 47, 49, 51, 53, 55, 57, 59, 61, 63, 65, 67, 69, 71, 73, 75, 77, 79, 81, 83, 85, 87, 89, 91, 93, 95, 97, 99, 101, 103, 105, 107, 109, 111, 113, 115, 117, 119, 121, 123, 125, 127, 129, 131, 133, 135, 137, 139, 141, 143, 145, 147, 149, 152, 154, 156, 158, 160, 162, 164, 166, 168, 170, 172, 174, 176, 178 and 180 include nucleotide sequences of any one of SEQ ID NOS: 2, 4, 6, 8, 10, 12, 14, 16, 18, 20, 22, 24, 26, 28, 30, 32, 34, 36, 38, 40, 42, 44, 46, 48, 50, 52, 54, 56, 58, 60, 62, 64, 66, 68, 70, 72, 74, 76, 78, 80, 82, 84, 86, 88, 90, 92, 94, 96, 98, 100, 102, 104, 106, 108, 110, 112, 114, 116, 118, 120, 122, 124, 126, 128, 130, 132, 134, 136, 138, 140, 142, 144, 146, 148, 150, 151, 153, 155, 157, 159, 161, 163, 165, 167, 169, 171, 173, 175, 177 and 179. The DNA includes cDNA, genomic DNA, and chemically synthesized DNA. In accordance with the degeneracy of the genetic code, at least one nucleotide in the nucleotide sequence encoding a protein consisting of an amino acid sequence of any one of SEQ ID NOS: 1, 3, 5, 7, 9, 11, 13, 15, 17, 19, 21, 23, 25, 27, 29, 31, 33, 35, 37, 39, 41, 43, 45, 47, 49, 51, 53, 55, 57, 59, 61, 63, 65, 67, 69, 71, 73, 75, 77, 79, 81, 83, 85, 87, 89, 91, 93, 95, 97, 99, 101, 103, 105, 107, 109, 111, 113, 115, 117, 119, 121, 123, 125, 127, 129, 131, 133, 135, 137, 139, 141, 143, 145, 147, 149, 152, 154, 156, 158, 160, 162, 164, 166, 168, 170, 172, 174, 176, 178 and 180 can be substituted with other nucleotides without altering the amino acid sequence of the protein produced from the gene. Therefore, the DNA sequences of the present invention also include nucleotide sequences altered by substitution based on the degeneracy of the genetic code. Such DNA sequences can be synthesized using known methods.

[0136] The DNA of the present invention includes a DNA which encodes a protein capable of activating NF-κB and hybridizes under stringent conditions with the DNA sequence of the above nucleotide sequence of any one of SEQ ID NOS: 2, 4, 6, 8, 10, 12, 14, 16, 18, 20, 22, 24, 26, 28, 30, 32, 34, 36, 38, 40, 42, 44, 46, 48, 50, 52, 54, 56, 58, 60, 62, 64, 66, 68, 70, 72, 74, 76, 78, 80, 82, 84, 86, 88, 90, 92, 94, 96, 98, 100, 102, 104, 106, 108, 110, 112, 114, 116, 118, 120, 122, 124, 126, 128, 130, 132, 134, 136, 138, 140, 142, 144, 146, 148, 150, 151, 153, 155, 157, 159, 161, 163, 165, 167, 169, 171, 173, 175, 177 and 179. Stringent conditions are apparent to those skilled in the art, and can be easily attained in accordance with various laboratory manuals such as T. Maniatis et al., Molecular Cloning A Laboratory Manual, Cold Spring Harbor Laboratory 1982, 1989.

[0137] That is, “stringent conditions” refer to overnight incubation at 37° C. in a hybridization solution containing 30% formamide, 5×SSC (0.75 M NaCl, 75 mM trisodium citrate), 5× Denhardt's solution, 0.5% SDS, 100 μg/ml denatured, sheared salmon sperm DNA) followed by washing (three times) in 2×SSC, 0.1% SDS for 10 minutes at room temperature, then followed by washing (two times) in 0.2×SSC, 0.1% SDS for 10 minutes at 37° C. (low stringency). Preferred stringent conditions are overnight incubation at 42° C. in a hybridization solution containing 40% formamide, followed by washing (three times) in 2×SSC, 0.1% SDS for 10 minutes at room temperature, then followed by washing (two times) in 0.2×SSC, 0.1% SDS for 10 minutes at 42° C. (moderate stringency). More preferred stringent conditions are overnight incubation at 42° C. in a hybridization solution containing 50% formamide, followed by washing (three times) in 2×SSC, 0.1% SDS for 10 minutes at room temperature, followed by washing (two times) in 0.2×SSC, 0.1% SDS for 10 minutes at 50° C. (high stringency). The DNA sequence thus obtained must encode a protein capable of activating NF-κB.

[0138] The present invention also includes a polynucleotide comprising a nucleotide sequence which encodes a protein capable of activating NF-κB and has a high sequence similarity to the nucleotide sequence of the polynucleotide according to above item (3) or (4). Typically these nucleotide sequence are 95% identical, preferably 97% identical, more preferably 98-99% identical, most preferably at least 99% identical to the nucleotide sequence of the polynucleotide according to above item (3) or (4) over the entire length thereof.

[0139] The above nucleotide sequence of the present invention can be used to produce the above protein using recombinant DNA techniques. In general, the DNA and peptide of the present invention can be obtained by:

[0140] (A) cloning the DNA encoding the protein of the present invention;

[0141] (B) inserting the DNA encoding the entire coding region of the protein or a part thereof into an expression vector to construct a recombinant vector;

[0142] (C) transforming host cells with the recombinant vector thus constructed; and

[0143] (D) culturing the obtained cells to express the protein or its analogue, and then purifying it by column chromatography.

[0144] General procedures necessary to handle DNA and recombinant host cells (e.g., E. coli) in the above steps are well known to those skilled in the art, and can be easily carried out in accordance with various laboratory manuals such as T. Maniatis et al., supra. All the enzymes, reagents, etc., used in these procedures are commercially available, and unless otherwise stated, such commercially available products can be used according to the use conditions specified by the manufacturer's instructions to attain completely its objects. The above steps (A) to (D) can be further illustrated in more details as follows.

[0145] Techniques for cloning the DNA encoding the protein of the present invention include, in addition to the methods described in the specification of the present application, PCR amplification using a synthetic DNA having a part of the nucleotide sequence of the present invention (e.g., any one of SEQ ID NOS: 2, 4, 6, 8, 10, 12, 14, 16, 18, 20, 22, 24, 26, 28, 30, 32, 34, 36, 38, 40, 42, 44, 46, 48, 50, 52, 54, 56, 58, 60, 62, 64, 66, 68, 70, 72, 74, 76, 78, 80, 82, 84, 86, 88, 90, 92, 94, 96, 98, 100, 102, 104, 106, 108, 110, 112, 114, 116, 118, 120, 122, 124, 126, 128, 130, 132, 134, 136, 138, 140, 142, 144, 146, 148, 150, 151, 153, 155, 157, 159, 161, 163, 165, 167, 169, 171, 173, 175, 177 and 179) as a primer, and selection of the DNA inserted into a suitable vector by hybridization with a labeled DNA fragment encoding a partial or full coding region of the protein of the present invention or a labeled synthetic DNA. Another technique involves direct amplification from total RNAs or mRNA fractions prepared from cells or tissues, using the reverse transcriptase polymerase chain reaction (RT-PCR method). As a DNA inserted into a suitable vector, for example, a commercially available library (e.g., from CLONTECH and STRATAGENE) can be used. Techniques for hybridization are normally used in the art, and can be easily carried out in accordance with various laboratory manuals such as T. Maniatis et al., supra. Depending on the intended purpose, the cloned DNA encoding the protein of the present invention can be used as such or if desired after digestion with a restriction enzyme or addition of a linker. The DNA thus obtained may have a nucleotide sequence of any one of SEQ ID NOS: 2, 4, 6, 8, 10, 12, 14, 16, 18, 20, 22, 24, 26, 28, 30, 32, 34, 36, 38, 40, 42, 44, 46, 48, 50, 52, 54, 56, 58, 60, 62, 64, 66, 68, 70, 72, 74, 76, 78, 80, 82, 84, 86, 88, 90, 92, 94, 96, 98, 100, 102, 104, 106, 108, 110, 112, 114, 116, 118, 120, 122, 124, 126, 128, 130, 132, 134, 136, 138, 140, 142, 144, 146, 148, 150, 151, 153, 155, 157, 159, 161, 163, 165, 167, 169, 171, 173, 175, 177 and 179, or a polynucleotide of above items (3) to (6). The DNA sequence to be inserted into an expression vector in the above step (B) may be a full-length cDNA or a DNA fragment encoding the above full-length protein, or a DNA fragment constructed so that it expresses a part thereof.

[0146] Thus, the present invention also includes a recombinant vector, which comprises the above DNA sequence. The expression vector for the protein of the present invention can be produced, for example, by excising the desired DNA fragment from the DNA encoding the protein of the present invention, and ligating the DNA fragment downstream of a promoter in a suitable expression vector.

[0147] Expression vectors for use in the present invention may be any vectors derived from prokaryotes (e.g., E. coli), yeast, fungi, insect viruses and vertebrate viruses so long as such vectors are replicable. However, the vectors should be selected to be compatible with microorganisms or cells used as hosts. Suitable combinations of host cell-expression vector systems are selected depending on the desired expression product.

[0148] When microorganisms are used as hosts, plasmid vectors compatible with these microorganisms are generally used as replicable expression vectors for recombinant DNA molecules.

[0149] For example, the plasmids pBR322 and pBR327 can be used to transform E. coli. Plasmid vectors normally contain an origin of replication, a promoter, and a marker gene conferring upon a recombinant DNA a phenotype useful for selecting the cells transformed with the recombinant DNA. Example of such promoters include a β-lactamase promoter, lactose promoter and tryptophan promoter. Examples of such marker genes include an ampicillin resistance gene, and a tetracycline resistance gene. Examples of suitable expression vectors include the plasmids pUC18 and pUC19 in addition to pBR322, pBR327.

[0150] In order to express the DNA of the present invention in yeast, for example, YEp24 can be used as a replicable vector. The plasmid YEp24 contains the URA3 gene, which can be employed as a marker gene. Examples of promoters in expression vectors for yeast cells include promoters derived from genes for 3-phosphoglycerate kinase, glyceraldehyde-3-phosphate dehydrogenase and alcohol dehydrogenase.

[0151] Examples of promoters and terminators for use in expression vectors to express the DNA of the present invention in fungal cells include promoters and terminators derived from genes for phosphoglycerate kinase (PGK), glyceraldehyde-3-phosphate dehydrogenase (GAPD) and actin. Examples of suitable expression vectors include the plasmids pPGACY2 and pBSFAHY83.

[0152] Examples of promoters for use in expression vectors to express the DNA of the present invention in insect cells include a polyhedrin promoter and P10 promoter.

[0153] Recombinant vectors used to express the DNA of the present invention in animal cells normally contain functional sequences to regulate genes, such as an origin of replication, a promoter to be placed upstream of the DNA of the present invention, a ribosome-binding site, a polyadenylation site and a transcription termination sequence. Such functional sequences, which can be used to express the DNA of the present invention in eukaryotic cells, can be obtained from viruses and viral substances. Examples of such functional sequences include an SRα promoter, SV40 promoter, LTR promoter, CMV (cytomegalovirus) promoter and HSV-TK promoter. Among them, a CMV promoter and SR a promoter can be preferably used. As promoters to be placed inherently upstream of the gene encoding the protein of the present invention, any promoters can be used so long as they are suitable for use in the above host-vector systems. Examples of origins of replication include foreign origins of replication, for example, those derived from viruses such as adenovirus, polyoma virus and SV40 virus. When vectors capable of integration into host chromosomes are used as expression vectors, origins of replication of the host chromosomes may be employed. Examples of suitable expression vectors include the plasmids pSV-dhfr (ATCC 37146), pBPV-1(9-1) (ATCC 37111), pcDNA3.1 (INVITROGEN) and pME18S-FL3.

[0154] The present invention also includes a transformed cell, which comprises the above recombinant vector.

[0155] Microorganisms or cells transformed with the replicable recombinant vector of the present invention can be selected from remaining untransformed parent cells based on at least one phenotype conferred by the recombinant vector. Phenotypes can be conferred by inserting at least one marker gene into the recombinant vector. Marker genes naturally contained in replicable vectors can be employed. Examples of marker genes include drug resistance genes such as neomycin resistance genes, and genes encoding dihydrofolate reductase.

[0156] As hosts for use in the above step (C), any of prokaryotes (e.g., E. coli), microorganisms (e.g., yeast and fungi) as well as insect and animal cells can be used so long as such hosts are compatible with the expression vectors used. Examples of such microorganisms include Escherichia coli strains such as E. coli K12 strain 294 (ATCC 31446), E. coli X1776 (ATCC 31537), E. coli C600, E. coli JM109 and E. coli B strain; bacterial strains belonging to the genus Bacillus such as Bacillus subtilis; intestinal bacteria other than E. coli, such as Salmonella typhimurium or Serratia marcescens; and various strains belonging to the genus Pseudomonas. Examples of such yeast include Saccharomyces cerevisiae, Schizosaccharomyces pombe, and Pichia pastoris. Examples of such fungi include Aspergillus nidulans, and Acremonium chrysogenum (ATCC 11550).

[0157] As insect cells, for example, Spodoptera frugiperda (Sf cells), High Five™ cells derived from eggs of Trichoplusiani, etc., can be used when the virus is AcNPV. Examples of such animal cells include HEK 293 cells, COS-1 cells, COS-7 cells, Hela cells, and Chinese hamster ovary (CHO) cells. Among them, CHO cells and HEK 293 cells are preferred.

[0158] When cells are used as hosts, combinations of expression vectors and host cells to be used vary with experimental objects. According to such combinations, two types of expression (i.e. transient expression and constitutive expression) can be included.

[0159] “Transformation” of microorganisms and cells in the above step (C) refers to introducing DNA into microorganisms or cells by forcible methods or phagocytosis of cells and then transiently or constitutively expressing the trait of the DNA in a plasmid or an intra-chromosome integrated form. Those skilled in the art can carry out transformation by known methods [see e.g., “Idenshi Kougaku Handbook (Genetic Engineering Handbook)”, an extra issue of “Jikken Igaku (Experimental Medicine)”, YODOSHA CO., LTD.]. For example, in the case of animal cells, DNA can be introduced into cells by known methods such as DEAE-dextran method, calcium-phosphate-mediated transfection, electroporation, lipofection, etc. For stable expression of the protein of the present invention using animal cells, there is a method in which selection can be carried out by clonal selection of the animal cells containing the chromosomes into which the introduced expression vectors have been integrated. For example, transformants can be selected using the above selectable marker as an indication of successful transformation. In addition, the animal cells thus obtained using the selectable marker can be subjected to repeated clonal selection to obtain stable animal cell strains highly capable of expressing the protein of the present invention. When a dihydrofolate reductase (DHFR) gene is used as a selectable marker, one can culture animal cells while gradually increasing the concentration of methotrexate (MTX) and select the resistant strains, thereby amplifying the DNA encoding the protein of the present invention together with the DHFR gene to obtain animal cell strains having higher levels of expression.

[0160] The above transformed cells can be cultured under conditions which permit the expression of the DNA encoding the protein of the present invention to produce and accumulate the protein of the present invention. In this manner, the protein of the present invention can be produced. Thus, the present invention also includes a process for producing a protein, which comprises culturing a transformed cell comprising the isolated polynucleotide according to above item (3) to (6) under conditions providing expression of the encoded protein and recovering the protein from the culture.

[0161] The above transformed cells can be cultured by methods known to those skilled in the art (see e.g., “Bio Manual Series 4”, YODOSHA CO., LTD.). For example, animal cells can be cultured by various known animal cell culture methods including attachment culture such as Petri dish culture, multitray type culture and module culture, attachment culture in which cells are attached to cell culture carriers (microcarriers), suspension culture in which productive cells themselves are suspended. Examples of media for use in the culture include media commonly used for animal cell culture, such as D-MEM and RPMI 1640.

[0162] In order to separate and purify the protein of the present invention from the above culture, suitable combinations of per se known separation and purification methods can be used. Examples such methods include methods based on solubility, such as salting-out and solvent precipitation; methods based on the difference in charges, such as ion-exchange chromatography; methods mainly based on the difference in molecular weights, such as dialysis, ultrafiltration, gel filtration and SDS-polyacrylamide gel electrophoresis; methods based on specific affinity, such as affinity chromatography; methods based on the difference in hydrophobicity, such as reverse phase high performance liquid chromatography; and methods based on the difference in isoelectric points, such as isoelectric focusing. For example, a protein of the present invention can be recovered and purified from recombinant cell cultures by well-known methods including ammonium sulfate or ethanol precipitation, acid extraction, anion or cation exchange chromatography, phosphocellulose chromatography, hydrophobic interaction chromatography, affinity chromatography, hydroxyapatite chromatography and lectin chromatography. Most preferably, high performance liquid chromatography is employed for purification. Well known techniques for refolding proteins may be employed to regenerate active conformation when the polypeptide is denatured during intracellular synthesis, isolation or purification.

[0163] The protein of the present invention can also be produced as a fusion protein with another protein. These fusion proteins are also included within the present invention. For the expression of such fusion proteins, any vectors can be used so long as the DNA encoding the protein can be inserted into the vectors and the vectors can express the fusion protein. Examples of proteins to which a polypeptide of the present invention can be fused include glutathione S-transferase (GST) and a hexa-histidine sequence (6×His). The fusion protein of the protein of the present invention with another protein can be advantageously purified by affinity chromatography using a substance with an affinity for the fusion partner protein. For example, fusion proteins with GST can be purified by affinity chromatography using glutathione as a ligand.

[0164] The present invention also includes an inhibitory protein, i.e., a protein capable of inhibiting the activity of the protein of above item (7). Examples of such inhibitory proteins include antibodies, or other proteins that bind to active sites of a protein of the above item (7), thereby inhibiting the expression of their activity.

[0165] The present invention also relates to an antibody that specifically binds the protein of the present invention or a fragment thereof, and to production of such an antibody. The antibody is not specifically limited so long as it can recognize the protein of the present invention. Examples of such antibodies include polyclonal antibodies, monoclonal antibodies and their fragments, single chain antibodies and humanized antibodies. Antibody fragments can be produced by known techniques. Examples of such antibody fragments include, but not limited to, F(ab′)₂ fragments, Fab′ fragments, Fab fragments and Fv fragments. The antibody that specifically binds the protein of the present invention can be produced using the protein of the present invention or a peptide thereof as an immunogen according to per se known process for producing antibodies or antisera. For example, a monoclonal or polyclonal antibody can be produced by administering the protein according to above item (1) or (2) as an antigen or epitope-bearing fragments to a non-human animal. Such methods are described, for example, in “Shin Idenshi Kougaku Handbook (New Genetic Engineering Handbook)”, the third edition, an extra issue of “Jikken Igaku (Experimental Medicine)”, YODOSHA CO., LTD.

[0166] In the case of polyclonal antibodies, for example, the protein of the present invention or a peptide thereof can be injected to animals such as rabbits to produce antibodies directed against the protein or peptide, and then their blood can be collected. The polyclonal antibodies can be purified from the blood, for example, by ammonium sulfate precipitation or ion-exchange chromatography, or by using the affinity column on which the protein has been immobilized.

[0167] In the case of monoclonal antibodies, for example, animals such as mice are immunized with the protein of the present invention, their spleen is removed and homogenized to obtain spleen cells, which are then fused with mouse myeloma cells by using a reagent such as polyethylene glycol. From the resulting hybrid cells (i.e. hybridoma cells), the clone producing the antibody directed against the protein of the present invention can be selected. Then, the resulting clonal hybridoma cells can be implanted intraperitoneally into mice, the ascitic fluid recovered from the mice. The resulting monoclonal antibody can be purified, for example, by ammonium sulfate precipitation or ion-exchange chromatography, or by using the affinity column on which the protein has been immobilized.

[0168] When the resulting antibody is used to administer it to humans, it is preferably used as a humanized antibody or human antibody in order to reduce its immunogenicity. The humanized antibody can be produced using transgenic mice or other mammals. For a general review of these humanized antibodies and human antibodies, see, for example, Morrison, S. L. et al., Proc. Natl. Acad. Sci. USA, 81:6851-6855 (1984); Jones, P. T. et al., Nature 321:522-525 (1986); Hiroshi Noguchi, Igaku no Ayumi (J. Clin. Exp. Med.) 167:457-462 (1993); Takashi Matsumoto, Kagaku to Seibutsu (Chemistry and Biology) 36:448-456 (1998). Humanized chimeric antibodies can be produced by linking a V region of a mouse antibody to a C region of a human antibody. Humanized antibodies can be produced by substituting a sequence derived from a human antibody for a region other than a complementarity-determining region from a mouse monoclonal antibody. In addition, human antibodies can be directly produced in the same manner as the production of conventional monoclonal antibodies by immunizing the mice whose immune systems have been replaced with human immune systems. These antibodies can be used to isolate or to identify clones expressing the protein or to purify the protein of the present invention from a cell extract or transformed cells producing the protein of the present invention. These proteins can also be used to construct ELISA, RIA (radioimmunoassay) and western blotting systems. These assay systems can be used for diagnostic purposes for detecting an amount of the protein of the present invention present in a body sample in a tissue or a fluid in the blood of an animal, preferably human. For example, they can be used for diagnosis of a disease characterized by undesirable activation of HF-κB resulting from (expression) abnormality of the protein of the present invention, such as inflammation, autoimmune disease, infection (for example, HIV infection), bone disease, cancer and the like. In order to provide a basis for diagnosis of a disease, a standard value must be established. However, this is a well-known technique to those skilled in the art. For example, a method of calculating the standard value comprises binding a body fluid or a cell extract of normal individual of a human or an animal to an antibody against the protein of the present invention under a suitable condition for the complex formation, detecting the amount of the antibody-protein complex by chemical or physical means and then calculating the standard value for the normal sample using a standard curve prepared from a standard solution containing a known amount of an antigen (the protein of the present invention). The presence of a disease can be confirmed by deviation from the standard value obtained by comparison of the standard value with the value obtained from a sample of an individual latently suffering from a disease associated with the protein of the present invention. These antibodies can also be used as reagents for studying functions of the protein of the present invention.

[0169] The antibodies of the present invention can be purified and then administered to patients of a disease characterized by undesirable activation of NF-κB resulting from (expression) abnormality of the protein of the present invention, such as inflammation, autoimmune disease, infection (such as HIV infection), bone disease, cancer and the like. Thus in another aspect, the present invention is a pharmaceutical composition which comprises the above antibody as an active ingredient, and therapy using the antibody of the present invention. In such pharmaceutical compositions, the active ingredient may be combined with other therapeutically active ingredients or inactive ingredients (e.g., conventional pharmaceutically acceptable carriers or diluents such as immunogenic adjuvants) and physiologically non-toxic stabilizers and excipients. The resulting combinations can be sterilized by filtration, and formulated into vials after lyophilization or into various dosage forms in stabilized and preservable aqueous preparations. Administration to a patient can be intra-arterial administration, intravenous administration and subcutaneous administration, which are well known to those skilled in the art. The dosage range depends upon the weight and age of the patient, route of administration and the like. Suitable dosages can be determined by those skilled in the art. These antibodies exhibit therapeutic activity by inhibiting the NF-κB activation mediated by the protein of the present invention.

[0170] The DNA of the present invention can also be used to isolate, identify and clone other proteins involved in intracellular signal transduction processes. For example, the DNA sequence encoding the protein of the present invention can be used as a “bait” in yeast two-hybrid systems (see e.g., Nature 340:245-246 (1989)) to isolate and clone the sequence encoding a protein (“prey”) which can associate with the protein of the present invention. In a similar manner, it can be determined whether the protein of the present invention can associate with other cellular proteins (e.g., NIK and TRAF2). In another method, proteins which can associate with the protein of the present invention can be isolated from cell extracts by immunoprecipitation [see e.g., “Shin Idenshi Kougaku Handbook (New Genetic Engineering Handbook)”, an extra issue of “Jikken Igaku (Experimental Medicine)”, YODOSHA CO., LTD.] using antibodies directed against the protein of the present invention. In still another method, the protein of the present invention can be expressed as a fusion protein with another protein as described above, and immunoprecipitated with an antibody directed against the fusion protein in order to isolate a protein which can associate with the protein of the present invention.

[0171] The diagnostic assays offer a process for diagnosing diseases or determining a susceptibility to the diseases through detection of mutation in a gene for a protein according to item (1), (2) or (7) which has a function of activating NF-κB, by the methods described. In addition, such diseases may be diagnosised by methods comprising determining from a sample derived from a subject an abonormally decreased or increased level of protein or mRNA. Decreased or increased expression can be measured at the RNA level using any of the methods well known in the art for the quantitation of polynucleotides, for example, nucleic acid amplification methods such as RT-PCR, and methods such as RNase protection assay, Northern blotting and other hybridization methods. Assay techniques that can be used to determine levels of a protein in a sample derived from a host are well-known to those skilled in the art. Such assay methods include radioimmunoassays, competitive-binding assays, Western blot analysis and ELISA assays. The DNA of the present invention can be used to detect abnormality in the DNA or mRNA encoding the protein of the present invention or a peptide fragment thereof. The invention relates to a method for diagnosing a disease, or susceptibility to a disease associated with the expression of the protein according to above item (1), (2) or (7) in a subject, which comprises determining mutations in the polynucleotide sequence encoding the protein. Thus, for example, the DNA of the present invention is useful for gene diagnosis regarding damage, mutations, and reduced, increased or over-expression of the DNA or mRNA. That is, the present invention includes a method for diagnosing a disease or susceptibility to a disease associated with the expression or activity of NF-κB in a subject, which comprises the steps of:

[0172] (a) determining the presence or absence of a mutation in the nucleotide sequence encoding the protein according to any one of claims 1, 2 or 7, in the genome of the subject, and/or

[0173] (b) analyzing the amount of expression of said protein in a sample derived from said subject, wherein a diagnosis of disease is preferably made when the amount of the protein expressed is 2-fold or higher than normal, or half or lower than normal.

[0174] When the nucleotide sequence encoding the protein of above item (1), (2) or (7) which has a function of activating NF-κB, contains a mutation according to the above step (a), the mutation may cause a disease associated with NF-κB activation. When the amount of the expression of the protein of above item (1), (2) or (7) is different from the normal value according to the above step (b), the abnormal expression of the novel protein of the present invention which acts to activate NF-κB may be responsible for diseases associated with NF-κB activation. In the above step (a), determination of the presence or absence of a mutation in the nucleotide seqeunce of a the gene encoding the protein of above item (1), (2) or (7) which has a function of activating NF-κB, may involve RT-PCR using a part of the nucleotide sequences of genes encoding these proteins as a primer, followed by conventional DNA sequencing to detect the presence or absence of the mutation. PCR-SSCP [Genomics 5:874-879 (1989); “Shin Idenshi Kougaku Handbook (New Genetic Engineering Handbook)”, an extra issue of “Jikken Igaku (Experimental Medicine)”, YODOSHA CO., LTD.] can also be used to determine the presence or absence of the mutation.

[0175] Measurement of the amount of the expression of the protein in the above step (b) may involve, for example, using the antibody of above item (16).

[0176] The present invention also relates to a method for screening compounds which inhibit or promote NF-κB activation using the proteins of the invention, which comprises the steps of:

[0177] (a) providing a cell with a gene encoding a protein that activates NF-κB, and a component that provides a detectable signal upon activation of NF-κB;

[0178] (b) culturing the transformed cell under conditions, which permit the expression of the gene in the transformed cell;

[0179] (c) contacting the transformed cell with one or more compounds; and

[0180] (d) measuring the detectable signal; and

[0181] (e) isolating or identifying an activator compound and/or an inhibitor compound by measuring the detectable signal.

[0182] Further, it is preferable to isolate or identify as an activator compound, a compound that increases said detectable signal 2-fold or higher than normal, and to isolate or identify as an inhibitor compound, a compound that decreases said detectable signal half or less than normal.

[0183] Examples of components capable of providing a detectable signal include reporter genes. Reporter genes are used instead of directly detecting the activation of transcription factors of interest. The transcriptional activity of a promoter of a gene is analyzed by linking the promoter to a reporter gene and measuring the activity of the product of the reporter gene (“Bio Manual Series 4” (1994), YODOSHA CO., LTD.).

[0184] Any peptide or protein can be used so long as those skilled in the art can measure the activity or amount of the expression product (including the amount of the produced mRNA) of the reporter genes. For example, enzymatic activity of chloramphenicol acetyltransferase, β-galactosidase, luciferase, etc., can be measured. Any reporter plasmids can be used to evaluate NF-κB activation so long as the reporter plasmids have an NF-κB recognition sequence inserted upstream of the reporter gene. For example, pNF-κB-Luc (STRATAGEGE) can be used. Other examples include NF-κB dependent reporter plasmids described in Tanaka S. et al., J. Vet. Med. Sci. Vol.59 (7); Rothe M. et al., Science Vol.269, p.1424-1427 (1995).

[0185] Any host cells may be used so long as NF-κB activation can be detected in the host cells. Preferred host cells are mammalian cells such as 293-EBNA cells. Transformation and culture of the cells can be carried out as described above.

[0186] In a specific embodiment, the method for screening a compound which inhibits or promotes NF-κB activation comprises culturing the transformed cell for a certain period of time, adding a certain amount of a test compound, measuring the reporter activity expressed by the cell after a certain period of time, and comparing the activity with that of a cell to which the test compound has not been added. The reporter activity can be measured by methods known in the art (see e.g., “Bio Manual Series 4” (1994), YODOSHA CO., LTD.). Examples of test compounds include, but not limited to, low molecular weight compounds and peptides. Test compounds may be artificially synthesized compounds or naturally occurring compounds. Test compounds may be a single compound or mixtures. Examples of such detectable signals which may be measured include the amount of mRNA or proteins for genes whose expression is known to be induced by NF-κB activation (e.g., genes for IL-1 and TNF-α) in addition to the above reporter genes. The amount of mRNA can be measured, for example, by northern hybridization, RT-PCR, etc. The amount of proteins can be measured, for example, by using antibodies. The antibodies may be produced by known methods. Commercially available antibodies(from, e.g., Wako Pure Chemical Industries, Ltd.) can also be used.

[0187] It is also possible to produce a pharmaceutical composition according to the following steps (a) to (f):

[0188] (a) providing a cell with a gene encoding a protein that activates NF-κB, and a component that provides a detectable signal upon activation of NF-κB;

[0189] (b) culturing the transformed cell under conditions, which permit the expression of the gene in the transformed cell;

[0190] (c) contacting the transformed cell with one or more candidate compounds;

[0191] (d) measuring the detectable signal;

[0192] (e) isolating or identifying an activator compound and/or an inhibitor compound by measuring the detectable signal; and

[0193] (f) optimizing the isolated or identified compound as a pharmaceutical composition.

[0194] Further, it is preferable to isolate or identify as an activator compound, a compound that increases said detectable signal 2-fold or higher than normal, and to isolate or identify as an inhibitor compound, a compound that decreases said detectable signal half or less than normal.

[0195] The protein of the present invention may also be used in a method for the structure-based design of an agonist, antagonist or inhibitor of the protein, by:

[0196] (a) determining in the first instance the three-dimensional structure of the protein;

[0197] (b) deducing the three-dimensional structure for the likely reactive or binding site(s) of an agonist, antagonist or inhibitor;

[0198] (c) synthesising candidate compounds that are predicted to bind to or react with the deduced binding or reactive site; and

[0199] (d) testing whether the candidate compounds are indeed agonists, antagonists or inhibitor.

[0200] The present invention also includes a compound obtainable by the above screening method. However, the screening method of the present invention is not limited to the above method. The present invention also includes a process for producing the pharmaceutical composition by the method of above item (14).

[0201] There is no special limitation to the above candidate compounds. Such compounds include low molecular weight compounds and peptides. They may be artificially synthesised compounds and naturally occurring compounds. As the compounds obtained by the above screening methods have a function of inhibiting or promoting NF-κB activation, they are useful as therapeutic or preventive pharmaceuticals for the treament of diseases resulting from unfavorable activation or inactivation of NF-κB. In order to isolate and purify the target compounds from the mixture, it is suitable to combine the known methods such as filtration, extraction, washings, drying, concentration, crystallization,various chromatography. When obtainment of a salt of the compounds is desired, a compound which is obtained in the form of a salt can be purified as it is. A compound which is obtained in the free form can be converted into a salt by isolating and purifying a salt obtained by dispersing or dissolving the compound into a suitable solvent and then adding a desired acid or base. Examples of a step to optimize the compounds or salts thereof obtained by the method of the present invention as a pharmceutical composition, include methods of formulating according to ordinary processes such as the following. The above compounds or their pharmaceutically acceptable salts in an amount effective as an active ingredient, and pharmaceutically acceptable carriers can be mixed. A form of formulation suitable for the mode of administration is selected. A composition suitable for oral administration includes a solid form such as tablet, granule, capsule, pill and powder, and solution form such as solution, syrup, elixir and dispersion. A form useful for parenteral administration includes sterile solution, dispersion, emulsion and suspension. The above carriers include, for example, sugars such as gelatin, lactose and glucose, starches such as corn, wheat, rice and maize, fatty acids such as stearic acid, salts of fatty acids such as calcium stearate, magnesium stearate, talc, vegetable oil, alcohol such as stearyl alcohol and benzyl alcohol, gum, and polyalkylene glycol. Examples of such liquid carriers include generally water, saline, sugar solution of dextrose and the lile, glycols such as ethylene glycol, propylene glycol and polyethylene glycol.

[0202] The present invention also includes a kit for screening compounds for activity to inhibit or promote NF-κB activation. The kit comprises reagents and the like necessary for screening compounds for inhibiting or promoting activity for NF-κB activation, including:

[0203] (a) a cell comprising a gene encoding a protein that activates NF-κB, and a component thst provides a detectable signal enabling detection of NF-κB activation after activation of NF-κB; and

[0204] (b) reagents for measuring the detectable signal.

[0205] In another aspect, the present invention relates to a diagnostic kit which comprises:

[0206] (a) a polynucleotide of the present invention having a nucleotide sequence expressed by SEQ ID NO: 2, 4, 6, 8, 10, 12, 14, 16, 18, 20, 22, 24, 26, 28, 30, 32, 34, 36, 38, 40, 42, 44, 46, 48, 50, 52, 54, 56, 58, 60, 62, 64, 66, 68, 70, 72, 74, 76, 78, 80, 82, 84, 86, 88, 90, 92, 94, 96, 98, 100, 102, 104, 106, 108, 110, 112, 114, 116, 118, 120, 122, 124, 126, 128, 130, 132, 134, 136, 138, 140, 142, 144, 146, 148, 150, 151, 153, 155, 157, 159, 161, 163, 165, 167, 169, 171, 173, 175, 177 or 179;

[0207] (b) a nucleotide sequence complementary to that of (a);

[0208] (c) a protein of the present invention having an amino acid seqeunce expressed by SEQ ID NO: 1, 3, 5, 7, 9, 11, 13, 15, 17, 19, 21, 23, 25, 27, 29, 31, 33, 35, 37, 39, 41, 43, 45, 47, 49, 51, 53, 55, 57, 59, 61, 63, 65, 67, 69, 71, 73, 75, 77, 79, 81, 83, 85, 87, 89, 91, 93, 95, 97, 99, 101, 103, 105, 107, 109, 111, 113, 115, 117, 119, 121, 123, 125, 127, 129, 131, 133, 135, 137, 139, 141, 143, 145, 147, 149, 152, 154, 156, 158, 160, 162, 164, 166, 168, 170, 172, 174, 176, 178 or 180, or a fragment thereof; or

[0209] (d) an antibody to the protein of the present invention of (c).

[0210] A kit comprising at least one of (a) to (d) is useful for diagnosing a disease or susceptibility to a disease such as inflammation, autoimmune diseases, infectious diseases (e.g., HIV infection) and cancers.

[0211] Because NF-κB is involved in a wide variety of pathological conditions such as inflammation, autoimmune diseases, cancers and viral infections, it is an attractive target for drug design and therapeutic intervention. Many experiments show that NF-κB activity may have significant physiological effects [see e.g., Ann. Rheum. Ds. 57:738-741 (1998); American Journal of Pathology 152:793-803 (1998); ARTHRITIS & RHEUMATISM 40:226-236 (1997); Am. J. Respir. Crit. Care Med. 158:1585-1592 (1998); J. Exp. Med. 188:1739-1750 (1998); Gut 42:477-484 (1998); The Journal of Immunology 161:4572-4582 (1998); Nature Medicine 3:894-899 (1997)]. The finding of the new protein described herein capable of activating NF-κB has provided a new method for controlling an abnormal NF-κB function. Thus, the present invention also relates to use of a compound which inhibits the function of the protein capable of activating NF-κB described above, for inhibiting NF-κB activation. Further, the present invention relates to a method of using a compound which activates the function of the protein capable of activating NF-κB described above, for promoting NF-κB activation. The compound obtained by the above screening method, which inhibits NF-κB activation, is useful as a medicament to treat or prevent diseases characterized by undesirable activation of NF-κB, such as inflammation, autoimmune diseases (such as rheumatoid arthritis, systemic lupus erythematosus, asthma, etc), infectious diseases, bone diseases, and graft rejection. Recently, it has also become apparent that NF-κB activation controls apoptosis of cells. The compound obtained by the above screening method, which inhibits NF-κB activation, may be capable of stimulating apoptosis. Diseases which may be treated by the induction of apoptosis include tumors.

[0212] Further, examples of diseases related to abnormality in NF-κB activation include AIDS (acquired immunodeficiency syndrome), neurodegenerative diseases (Alzheimer's disease, Parkinson's disease, amyotrophic lateral sclerosis, etc.) ischemic disorders (i.e. those caused by cardiac infarction, reperfusion injury, etc), myelogenesis incompetency syndrome (aplastic anemia, etc), skin diseases (Toxic epidermal necrolysis, etc), proliferative nephritis (IgA nephritis, purpuric nephritis, lupus nephritis, etc) and fulminant hepatitis. Thus, a compound obtained by the above screening method, which inhibits or promotes NF-κB activation, is useful as a medicament to treat or prevent these diseases.

[0213] In addition, the gene encoding the protein of the present invention is useful for gene therapy to treat various diseases such as cancers, autoimmune diseases, allergy diseases and inflammatory response. “Gene therapy” refers to administering into the human body a gene or a cell into which a gene has been introduced. The protein of the present invention and the DNA encoding the protein can also be used for diagnostic purposes.

[0214] The compound obtained by the screening method of the present invention or a salt thereof can be formulated into the above pharmaceutical compositions (e.g., tablets, capsules, elixirs, microcapsules, sterile solutions and suspensions) according to conventional procedures. The formulations thus obtained are safe and of low toxicity, and can be administered, for example, to humans and mammals (e.g., rats, rabbits, sheep, pigs, cattle, cats, dogs and monkeys). Administration to patients can be carried out by methods known in the art, such as intra-arterial injection, intravenous injection and subcutaneous injection. The dosage may vary with the weight and age of the patient as well as a mode of administration, but those skilled in the art can appropriately select suitable dosages. When the compound can be encoded by DNA, the DNA can be inserted into a vector for gene therapy, and gene therapy can be carried out. The dosage and mode of administration may vary with the weight, age and symptoms of the patient, but those skilled in the art can appropriately select them. Thus, the present invention also relates to a pharmaceutical composition which comprises the above compound as an active ingredient.

[0215] In addition, the above compound is useful as a medicament to treat or prevent diseases characterized by abnormal NF-κB activity, such as inflammation, autoimmune diseases, viral diseases, infectious diseases, cancers and bone diseases. Thus, the present invention also relates to a pharmaceutical composition for inflammation, autoimmune diseases, viral diseases, infectious diseases, cancers, bone diseases, etc., which comprises the above compound. Specifically, the compound is useful as a therapeutic and/or prophylactic drug against, for example, rheumatoid arthritis, osteoarthritis, systemic lupus erythematosus, diabetes, sepsis, asthma, allergic rhinitis, ischemic heart diseases, inflammatory intestinal diseases, subarachnoid hemorrhage, viral hepatitis, AIDS, atherosclerosis, atopic dermatosis, viral infections, Crohn's disease, diabetes, gout, hepatitis, multiple sclerosis, cardiac infarction, nephritis, osteoporosis, Alzheimer's, Parkinson's disease, Huntington's chorea, psoriasis, amyotrophic lateral sclerosis, or aplastic anemia.

[0216] The present invention also relates to the use of a pharmaceutical composition produced according to above item (14) for manufacturing a medicament against inflammation, autoimmune diseases, viral diseases, cancers, infectious diseases, bone diseases, etc. The present invention also includes an antisense oligonucleotide against a gene of any one of above items (3) to (6). An antisense oligonucleotide refers to an oligonucleotide complementary to the target gene sequence. The antisense oligonucleotide can inhibit the expression of the target gene by inhibiting RNA functions such as translation to proteins, transport to the cytoplasm and other activity necessary for overall biological functions. In this case, the antisense oligonucleotide may be RNA or DNA. The DNA sequence of the present invention can be used to produce an antisense oligonucleotide capable of hybridizing with the mRNA transcribed from the gene encoding the protein of the present invention. It is known that an antisense oligonucleotide generally has an inhibitory effect on the expression of the corresponding gene (see e.g., Saibou Kougaku Vol.13, No.4 (1994)). The oligonucleotide containing an antisense coding sequence against a gene encoding the protein of the present invention can be introduced into a cell by standard methods. The oligonucleotide effectively blocks the translation of mRNA of the gene encoding the protein of the present invention, thereby blocking its expression and inhibiting undesirable activity.

[0217] The oligonucleotide of the present invention may be a naturally occurring oligonucleotide or its modified form [see e.g., Murakami & Makino, Saibou Kougaku Vol.13, No.4, p.259-266 (1994); Akira Murakami, Tanpakushitsu Kakusan Kouso (PROTEIN, NUCLEIC ACID AND ENZYME) Vol.40, No.10, p.1364-1370 (1995),Tunenari Takeuchi et al., Jikken Igaku (Experimental Medicien) Vol. 14, No. 4 p85-95(1996)]. Thus, the oligonucleotide may have modified sugar moieties or inter-sugar moieties. Examples of such modified forms include phosphothioates and other sulfur-containing species used in the art. According to several preferred embodiments of the present invention, at least one phosphodiester bond in the oligonucleotide is substituted with the structure which can enhance the ability of the composition to permeate cellular regions where RNA with the activity to be regulated is located.

[0218] Such substitution preferably involves a phosphorothioate bond, a phosphoramidate bond, methylphosphonate bond, or a short-chain alkyl or cycloalkyl structure. The oligonucleotide may also contain at least some modified base forms. Thus, it may contain purine and pyrimidine derivatives other than naturally occurring purine and pyrimidine. Similarly, the furanosyl moieties of the nucleotide subunits can be modified so long as the essential purpose of the present invention is attained. Examples of such modifications include 2′-O-alkyl and 2′-halogen substituted nucleotides. Examples of modifications in sugar moieties at their 2-position include OH, SH, SCH₃, OCH₃, OCN or O(CH₂)ₙCH₃, wherein n is 1 to about 10, and other substituents having similar properties. All the analogues are included in the scope of the present invention so long as they can hybridize with the mRNA of the gene of the present invention to inhibit functions of the mRNA.

[0219] The oligonucleotide of the present invention contains about 3 to about 50 nucleotides, preferably about 8 to about 30 nucleotides, more preferably about 12 to about 25 nucleotides. The oligonucleotide of the present invention can be produced by the well-known solid phase synthesis technique. Devices for such synthesis are commercially available from some manufactures including Applied Biosystems. Other oligonucleotides such as phosphothioates can also be produced by methods known in the art.

[0220] The oligonucleotide of the present invention is designed to hybridize with the mRNA transcribed from the gene of the present invention. Those skilled in the art can easily design an antisense oligonucleotides based on a given gene sequence (For example, Murakami and Makino: Saibou Kougaku Vol. 13 No.4 p259-266 (1994), Akira Murakami: Tanpakushitsu Kakusan Kouso (PROTEIN, NUCLEIC ACID AND ENZYME) Vol. 40 No.10 pl364-1370 (1995), Tunenari Takeuchi et al., Jikken Igaku (Experimental Medicine) Vol. 14 No. 4 p85-95 (1996)). Recent sutudy suggests that antisense oligonucleotides which are designed in a region containing 5′ region of mRNA, preferably,the translation initaiation site,are most effective for the inhibition of the expression of a gene. The length of the antisense oligonucleotides is preferably 15 to 30 nucleotides and more preferably 20 to 25 nucleotides. It is important to confirm no interaction with other mRNA and no formation of secondary structure in the oligonucleotide sequence by homology search. The evaluation of whether the designed antisense oligonucleotide is functional or not can be determined by introducing the antisence oligonucleotide into a suitable cell and measuring the amount of the target mRNA, for example by northern blotting or RT-PCR, or the amount of the target protein, for example by western blotting or fluorescent antibody technique, to confirm the effect of expression inhibition.

[0221] Another method includes the triple helix technique. This technique involves forming a triple helix on the targeted intra-nuclear DNA sequence, thereby regulating its gene expression, mainly at the transcription stage. The oligonucleotide is designed mainly in the gene region involved in the transcription and inhibits the transcription and the production of the protein of the present invention. Such RNA, DNA and oligonucleotide can be produced using known synthesizers.

[0222] The oligonucleotide may be introduced into the cells containing the target nucleic acid sequence by any of DNA transfection methods such as calcium phosphate method, electroporation, lipofection, microinjection, or gene transfer methods including the use of gene transfer vectors such as viruses. An antisense oligonucleotide expression vector can be prepared using a suitable retrovirus vector, then the expression vector can be introduced into the cells containing the target nucleic acid sequence by contacting the vector with the cells in vivo or ex vivo.

[0223] The DNA of the present invention can be used in the antisense RNA/DNA technique or the triple helix technique to inhibit NF-κB activation mediated by the protein of the present invention.

[0224] The antisense oligonucleotide against the gene encoding the protein of the present invention is useful as a medicament to treat or prevent diseases characterized by undesirable activation of NF-κB, such as inflammation, autoimmune diseases, infectious diseases (e.g., HIV infection) and cancers. Thus, the present invention also includes a pharmaceutical composition which comprises the above antisense oligonucleotide as an active ingredient. The antisense oligonucleotide can also be used to detect such diseases using northern hybridization or PCR.

[0225] The present invention also includes a ribozyme which inhibits NF-κB activation. A ribozyme is an RNA capable of recognizing a nucleotide sequence of a nucleic acid and cleaving the nucleic acid (see e.g., Hiroshi Yanagawa, “Jikken Igaku (Experimental Medicine) Bioscience 12: New Age of RNA). The ribozyme can be produced so that it cleaves the selected target RNA (e.g., mRNA encoding the protein of the present invention). Based on the nucleotide sequence of the DNA encoding the protein of the present invention, the ribozyme specifically cleaving the mRNA of the protein of the present invention can be designed. Such ribozyme has a complementary sequence to the mRNA for the protein of the present invention, complementarily associates with the mRNA and then cleaves the mRNA, which results in reduction or entire loss of the expression of the protein of the present invention. The level of the reduction of the expression is dependent on the level of the ribozyme expression in the target cells.

[0226] There are two types of ribozyme commonly used: a hammerhead ribozyme and a hairpin ribozyme. In particular, hammerhead ribozymes have been well studied regarding their primary and secondary structure necessary for their cleavage activity, and those skilled in the art can easily design the ribozymes nucleotided solely on the nucleotide sequence information for the DNA encoding the protein of the present invention [see e.g., Iida et al., Saibou Kougaku Vol.16, No.3, p.438-445 (1997); Ohkawa & Taira, Jikken Igaku (Experimental Medicine) Vol.12, No.12, p.83-88 (1994)]. It is known that the hammerhead ribozymes have a structure consisting of two recognition sites (recognition site I and recognition site II forming a chain complementary to target RNA) and an active site, and cleave the target RNA at the 3′ end of its sequence NUX (wherein N is A or G or C or U, and X is A or C or U)after the formation of a complementary pair with the target RNA in the recognition sites. In particular, the sequence GUC (or GUA) has been found to have the highest activity [see e.g., Koizumi, M. et al., Nucl. Acids Res. 17:7059-7071 (1989); Iida et al., Saibou Kougaku Vol.16, No.3, p.438-445 (1997); Ohkawa & Taira, Jikken Igaku (Experimental Medicine) Vol.12, No.12, p.83-88 (1994); Kawasaki & Taira, Jikken Igaku (Experimental Medicine) Vol.18, No.3, p.381-386 (2000)].

[0227] Therefore the sequence GTC (or GTA) is searched out, and a ribozyme is designed to form several,up to 10 to 20 complementary base pairs around that sequence. The suitability of the designed ribozyme can be evaluated by checking whether the prepared ribozyme can cleave the target mRNA in vitro according to the method described for example in Ohkawa & Taira, Jikken Igaku (Experimental Medicine) Vol.12, No.12, p.83-88 (1994). The ribozyme can be prepared by methods known in the art to synthesize RNA molecules.

[0228] Alternatively, the sequence of the ribozyme can be synthesized on a DNA synthesizer and inserted into various vectors containing a suitable RNA polymerase promoter (e.g., T7 or SP6) to enzymatically synthesize an RNA molecule in vitro. Such ribozymes can be introduced into cells by gene transfer methods such as microinjection. Another method involves inserting a ribozyme DNA into a suitable expression vector and introducing the vector into cell strains, cells or tissues. Suitable vectors can be used to introduce the ribozyme into a selected cell. Examples of vectors commonly used for such purpose include plasmid vectors and animal virus vectors (e.g., retrovirus, adenovirus, herpes or vaccinia virus vectors). Such ribozymes are capable of inhibiting the NF-κB activation mediated by the protein of the present invention.

[0229] The present invention, moreover, relates to a process for obtaining a new gene having a function, which comprises using the oligo-capping method to construct a full-length cDNA library, and using a signal factor indicative of the presence of a protein having the function. An example of such signal factor is a reporter gene.

[0230] Methods using a cDNA library containing a lot of non-full-length cDNAs are inefficient in obtaining many genes (cDNAs) having functions. Therefore libraries with a high ratio of the number of the full-length cDNA clones to the total number of the clones are necessary. “Full-length cDNA” refers to a complete DNA copy of mRNA from a gene. The cDNA libraries produced using the oligo-capping method contain full-length cDNA clones in a ratio of 50 to 80%, namely, a 5 to 10-fold increase in full-length cDNA clones compared to the cDNA libraries produced by prior art methods (Sumio Sugano, the monthly magazine BIO INDUSTRY Vol.16, No.11, p.19-26). Full-length cDNA clones are essential for protein expression in functional analyses of genes, and full-length cDNA clones themselves are very important materials for activity measurement. Thus, cloning of full-length cDNA is necessary for functional analyses of genes. Sequencing of the cDNA not only provides important information for establishing the primary sequence of the protein encoded by the cDNA, but also reveals the entire exon sequence. Thus, the full-length cDNA provides valuable information for identifying a gene, such as information for determining the primary sequence of a protein, exon-intron structure, the transcription initiation site of mRNA, the location of a promoter, etc.

[0231] The construction of full-length cDNA libraries by the oligo-capping method can be carried out, for example, according to the method described in “Shin Idenshi Kougaku Handbook (New Genetic Engineering Handbook)”, the third edition (1999), an extra issue of “Jikken Igaku (Experimental Medicine)”, YODOSHA CO., LTD. The reporter gene indicative of the presence of a protein having a function contains one or more suitable expression regulation sequence portion to which a protein factor such as a transcriptional factor can bind, and a structural gene portion which allows the measurement of the activation of the proteins factor. The structural gene portion may encode any peptide or protein so long as those skilled in the art can measure the activity or amount of its expression product (including the amount of the mRNA produced). For example, chloramphenicol acetyltransferase, β-galactosidase, luciferase, etc., can be used and their enzymatic activity measured.

[0232] The oligo-capping method used herein involves substituting a cap structure with a synthetic oligo sequence by using BAP, TAP and an RNA ligase, as described in Suzuki & Sugano, “Shin Idenshi Kougaku Handbook (New Genetic Engineering Handbook)”, the third edition (1999), an extra issue of “Jikken Igaku (Experimental Medicine)”, YODOSHA CO., LTD.

[0233] The process of the present invention uses an in vitro system or a cell-based system, preferably a cell-based system. Examples of such cells include cells of prokaryotes such as E. coli, microorganisms such as yeast and fungi, as well as insects and animals. Preferred examples include animal cells, in particular, 293-EBNA cells and NIH3T3 cells.

[0234] Examples of reporter genes indicative of the presence of a protein having a function include reporter genes containing a CREB (cAMP responsive element binding protein) binding sequence or AP-1 (activator protein-1) binding sequence at the expression regulation sequence region of the reporter genes, in addition to the NF-κB reporter genes described herein. For example, if a gene capable of activating CREB is to be obtained, a CREB-dependent reporter plasmid and an expression vector comprising full-length cDNA produced by the oligo-capping method can be cotransfected into cells, and an expression vector having increased reporter activity can be selected from the cells to attain the purpose. If a gene capable of inhibiting CREB is to be obtained, a CREB-dependent reporter plasmid and an expression vector comprising full-length cDNA produced by the oligo-capping method can be cotransfected into cells, and an expression vector having decreased reporter activity can be selected from the cells to attain the purpose. These procedures may be carried out in the presence of a certain stimulus to the cells. The cDNA clone (expression vector) to be transfected into the cells may be a single clone or multiple clones which may be transfected simultaneously. One embodiment of the process of the present invention is detailed in Examples herein. Alternatively, a screening system for obtaining a gene capable of inhibiting NF-κB activation can also be constructed by cotransfecting an expression vector comprising full-length cDNA and a reporter gene into cells, stimulating the cells with IL-1 or TNF-α and the like, and selecting a clone having subnormally increased reporter activity.

[0235] However, the process of the present invention is not limited to these embodiments.

[0236] Because the cDNA of the present invention is full-length, its 5′ end sequence is the transcription initiation site of the corresponding mRNA. Therefore the cDNA sequence can be used to identify the promoter region of the gene by comparing the cDNA with the genomic nucleotide sequence. Genomic nucleotide sequences are available from various databases when the sequences have been deposited in the databases. Alternatively, the cDNA can also be used to clone the desired sequence from a genomic library, for example, by hybridization, and determine its nucleotide sequence. Thus, by comparing the nucleotide sequence of the cDNA of the present invention with a genomic sequence, the promoter region of the gene located upstream the cDNA can be identified. In addition, the promoter fragment thus identified can be used to construct a reporter plasmid for evaluating the expression of the gene. In general, the DNA fragment spanning 2 kb (preferably 1 kb) upstream from the transcription initiation site can be inserted upstream of the reporter gene to produce the reporter plasmid. The reporter plasmid can be used to screen for a compound which enhances or reduces the expression of the gene. For example, such screening can be carried out by transforming a suitable cell with the reporter plasmid, culturing the transformed cell for a certain period of time, adding a certain amount of a test compound, measuring the reporter activity expressed by the cell after a certain period of time, and comparing the activity with that of a cell to which the test compound has not been added. These methods are also included in the scope of the present invention.

[0237] The present invention also relates to a computer-readable medium on which a sequence data set has been stored, said sequence data set comprising at least one nucleotide sequence selected from the group consisting of SEQ ID NOS: 2, 4, 6, 8, 10, 12, 14, 16, 18, 20, 22, 24, 26, 28, 30, 32, 34, 36, 38, 40, 42, 44, 46, 48, 50, 52, 54, 56, 58, 60, 62, 64, 66, 68, 70, 72, 74, 76, 78, 80, 82, 84, 86, 88, 90, 92, 94, 96, 98, 100, 102, 104, 106, 108, 110, 112, 114, 116, 118, 120, 122, 124, 126, 128, 130, 132, 134, 136, 138, 140, 142, 144, 146, 148, 150, 151, 153, 155, 157, 159, 161, 163, 165, 167, 169, 171, 173, 175, 177 and 179, and/or at least one amino acid sequence selected from the group consisting of SEQ ID NOS: 1, 3, 5, 7, 9, 11, 13, 15, 17, 19, 21, 23, 25, 27, 29, 31, 33, 35, 37, 39, 41, 43, 45, 47, 49, 51, 53, 55, 57, 59, 61, 63, 65, 67, 69, 71, 73, 75, 77, 79, 81, 83, 85, 87, 89, 91, 93, 95, 97, 99, 101, 103, 105, 107, 109, 111, 113, 115, 117, 119, 121, 123, 125, 127, 129, 131, 133, 135, 137, 139, 141, 143, 145, 147, 149, 152, 154, 156, 158, 160, 162, 164, 166, 168, 170, 172, 174, 176, 178 and 180.

[0238] In another aspect, the present invention relates to a method for calculating a homology, which comprises comparing data on the above medium with data of other nucleotide sequences. Thus, the gene and amino acid sequence of the present invention provide valuable information for determining their secondary and tertiary structure, e.g., information for identifying other sequence having a similar function and high homology. These sequences are stored on the computer-readable medium, then a database is searched using data stored in a known macromolecule structure program and a known search tool such as GCG. In this manner, a sequence in a database having a certain homology can be easily found.

[0239] The computer-readable medium may be any composition of materials used to store information or data. Examples of such media include commercially available floppy disks, tapes, chips, hard drives, compact disks and video disks. The data on the medium allows a method for calculating a homology by comparing the data with other nucleotide sequence data. This method comprises the steps of providing a first polynucleotide sequence containing the polynucleotide sequence of the present invention for the computer-readable medium, and then comparing the first polynucleotide sequence with at least one-second polynucleotide or polypeptide sequence to identify the homology.

[0240] The present invention also relates to an insoluble substrate to which polynucleotide comprising all or part of the nucleotide sequences selected from the group consisting of SEQ ID NOS: 2, 4, 6, 8, 10, 12, 14, 16, 18, 20, 22, 24, 26, 28, 30, 32, 34, 36, 38, 40, 42, 44, 46, 48, 50, 52, 54, 56, 58, 60, 62, 64, 66, 68, 70, 72, 74, 76, 78, 80, 82, 84, 86, 88, 90, 92, 94, 96, 98, 100, 102, 104, 106, 108, 110, 112, 114, 116, 118, 120, 122, 124, 126, 128, 130, 132, 134, 136, 138, 140, 142, 144, 146, 148, 150, 151, 153, 155, 157, 159, 161, 163, 165, 167, 169, 171, 173, 175, 177 and 179, are fixed. A plurality of the various polynucleotides which are DNA probes are fixed on a specifically processed solid substrate such as slide glass to form a DNA microarray and then a labeled target polynucleotide is hybridized with the fixed polynucleotides to detect a signal from each of the probes. The data obtained is analyzed and the gene expression is determined.

[0241] The present invention further relates to an insoluble substrate to which polypeptides comprising all or part of the amino acid sequences selected from the group consisting of SEQ ID NOS: 1, 3, 5, 7, 9, 11, 13, 15, 17, 19, 21, 23, 25, 27, 29, 31, 33, 35, 37, 39, 41, 43, 45, 47, 49, 51, 53, 55, 57, 59, 61, 63, 65, 67, 69, 71, 73, 75, 77, 79, 81, 83, 85, 87, 89, 91, 93, 95, 97, 99, 101, 103, 105, 107, 109, 111, 113, 115, 117, 119, 121, 123, 125, 127, 129, 131, 133, 135, 137, 139, 141, 143, 145, 147, 149, 152, 154, 156, 158, 160, 162, 164, 166, 168, 170, 172, 174, 176, 178 and 180, are fixed. By mixing organism-derived cell extract with the insoluble substrate on which these proteins are fixed, it is possible to isolate or identify cell-derived components such as proteins captured on the insoluble substrate that can be expected to be useful in diagnosis or drug development.

### EXAMPLES

[0242] The following examples further illustrate, but do not limit the present invention.

### Example 1

[0243] Construction of a Full-length cDNA Library Using the Oligo-capping Method

[0244] (1) Preparation of RNA from Human Lung Fibroblasts (Cryo NHLF)

[0245] Human lung fibroblasts (Cryo NHLF: purchased from Sanko Junyaku Co., Ltd.) were cultured according to the attached protocol. After repeating subculturing the cells to obtain fifty 10 cm dishes containing the resulting culture, the cells were recovered with a cell scraper. Then, total RNA was obtained from the recovered cells by using the RNA extraction reagent ISOGEN (purchased from NIPPON GENE) according to the manufacturer's protocol. Then, poly A⁺ RNA was obtained from the total RNA by using an oligo-dT cellulose column according to Maniatis et al., supra.

[0246] (2) Preparation of RNA from Mouse ATDC5 Cells

[0247] ATDC5, a cell strain cloned from mouse EC (embryonal carcinoma) (Atsumi, T. et al.: Cell Diff. Dev., 30: p109-116)(1990) was repeatedly subcultured to obtain fifty 10 cm dishes containing the resultant culture. Thereafter, poly A⁺ RNA was obtained by a method similar to that of (1) above. Culture of ATDC5 cells was performed according to the method described in Atsumi, T. et al.: Cell Diff. Dev., 30: p109-116 (1990).

[0248] (3) Construction of a Full-length cDNA Library by the Oligo-capping Method

[0249] A full-length cDNA library was constructed from poly A⁺ RNA of the above human lung fibroblasts and ATDC5 cells by the oligo-capping method according to the method of Sugano S. et al. [e.g., Maruyama, K. & Sugano, S., Gene, 138:171-174 (1994); Suzuki, Y. et al., Gene, 200:149-156 (1997); Suzuki, Y. & Sugano, S. “Shin Idenshi Kougaku Handbook (New Genetic Engineering Handbook)”, the third edition (1999), an extra issue of “Jikken Igaku (Experimental Medicine)”, YODOSHA CO., LTD.].

[0250] (4) Preparation of Plasmid DNA

[0251] The full-length cDNA library constructed as above was transfected into E. coli strain TOP 10 by electroporation, then spread on LB agar medium containing 100 μg/ml of ampicillin, and incubated overnight at 37° C. Then, using QIAwell 96 Ultra Plasmid Kit (QIAGEN) according to the manufacturer's protocol, the plasmids were recovered from the colonies grown on ampicillin-containing LB agar medium.

### Example 2

[0252] Cloning of DNA Capable of Activating NF-κB

[0253] (1) Screening of the cDNA Encoding the Protein Capable of Activating NF-κB

[0254] 293-EBNA cells (purchased from Invitrogen) were grown to 1×10⁴ cells/100 μl/well in a 96 well plate for cell culture for 24 hours at 37° C. (in the presence of 5% CO₂) using 5% FBS containing DMEM medium. Then, 50 ng of pNFκB-Luc (purchased from STRATAGENE) and 2 μl of the full-length cDNA expression vector prepared in above Example 1.(4) were cotransfected into the cells in a well using FuGENE 6 (purchased from Roche) according to the manufacturer's protocol. After 24 hours of culture at 37° C., the reporter activity of NF-κB (luciferase activity) was measured using long-term luciferase assay system,PIKKA GENE LT2.0 (TOYO INK) according to the attached manufacturer's activity was measured using Wallac ARVO™ST 1420 MULTILABEL COUNTER (Perkin Elmer).

[0255] (2) DNA Sequencing

[0256] The above screening was carried out for 155,000 clones, and plasmids showing a 5-fold or more increase in luciferase activity compared to that of the control experiment (luciferase activity of the cell into which vacant vector pME18S-FL3 is introduced instead of full-length cDNA expression vector) were selected. One pass sequencing was carried out from the 5′ end of the cloned cDNA (sequencing primer: 5′-CTTCTGCTCTAAAAGCTGCG-3′ (SEQ ID NO: 181)) and from the 3′ end (sequencing primer: 5′-CGACCTGCAGCTCGAGCACA-3′ (SEQ ID NO: 182)) so that as long sequence as possible is determined. The sequencing was carried out using the reagent Thermo Sequenase II Dye Terminator Cycle Sequencing Kit (Amersham Pharmacia Biotech) or BigDye Terminator Cycle Sequencing FS Ready Reaction Kit (Applied Biosystems) and the device ABI PRISM 377 sequencer or ABI PRISM 3100 sequencer according to the manufacturer's instructions.

[0257] (3) Database Analysis of the Obtained Clones

[0258] BLAST (Basic local alignment search tool) searching [S. F. Altschul et at., J. Mol. Biol., 215:403-410 (1990)] was carried out in GenBank for the obtained nucleotide sequence. The results showed that 148 clones represented 90 genes encoding new proteins capable of activating NF-κB.

[0259] (4) Full-length Sequencing

[0260] The full-length DNA sequences for the 90 new clones were determined (SEQ ID NOS: 2, 4, 6, 8, 10, 12, 14, 16, 18, 20, 22, 24, 26, 28, 30, 32, 34, 36, 38, 40, 42, 44, 46, 48, 50, 52, 54, 56, 58, 60, 62, 64, 66, 68, 70, 72, 74, 76, 78, 80, 82, 84, 86, 88, 90, 92, 94, 96, 98, 100, 102, 104, 106, 108, 110, 112, 114, 116, 118, 120, 122, 124, 126, 128, 130, 132, 134, 136, 138, 140, 142, 144, 146, 148, 150, 151, 153, 155, 157, 159, 161, 163, 165, 167, 169, 171, 173, 175, 177 and 179). The amino acid sequences of the protein coding regions (open reading frames) were deduced (SEQ ID NOS: 1, 3, 5, 7, 9, 11, 13, 15, 17, 19, 21, 23, 25, 27, 29, 31, 33, 35, 37, 39, 41, 43, 45, 47, 49, 51, 53, 55, 57, 59, 61, 63, 65, 67, 69, 71, 73, 75, 77, 79, 81, 83, 85, 87, 89, 91, 93, 95, 97, 99, 101, 103, 105, 107, 109, 111, 113, 115, 117, 119, 121, 123, 125, 127, 129, 131, 133, 135, 137, 139, 141, 143, 145, 147, 149, 152, 154, 156, 158, 160, 162, 164, 166, 168, 170, 172, 174, 176, 178 and 180).

### Example 3

[0261] Screening Compounds Inhibiting NF-κB Activation

[0262] 293-EBNA cells were seeded on 5% FBS containing DMEM medium in a 96-well cell culture plate to a final cell density of 1×10⁴ cells/100 μl/well, and cultured for 24 hours at 37° C. in the presence of 5% CO₂. Then, 50 ng of the expression vector comprising the gene encoding NF-κB activating protein of SEQ ID NO: 5, 9, 17, 21, 35, 37, 41, 53, 57, 63, 67, 71, 75, 81, 87, 91, 93, 97, 121, 123, 129, 154, 158, 162, 168, 170, 172, 176 or 178, and 50 ng of the reporter plasmid pNFκB-Luc were cotransfected into the cells in a well using FuGENE 6. After 1 hour, the proteasome inhibitor MG-132 (purchased form CALBIOCHEM) (Uehara T. et al., J. Biol. Chem. 274, p.15875-15882 (1999); Wang X. C. et al., Invest. Ophathalmol. Vis. Sci. 40, p.477-486) was added to the culture to final concentrations of 0.1 μM , 0.5 μM , 1.0 μM and 10 μM, respectively. After 24 hours of culture at 37° C., the reporter activity was measured using PIKKA GENE LT2.0. The results showed that MG132 inhibited the expression of the reporter gene (FIG. 1 to FIG. 29).

[0263] Industrial Applicability

[0264] As described above, the present invention provides industrially highly useful proteins capable of activating NF-κB and genes encoding the proteins. The proteins of the present invention and the genes encoding the proteins allow not only screening for compounds useful for treating and preventing diseases associated with the excessive activation or inhibition of NF-κB, but also production of diagnostics for such diseases. The genes of the present invention are also useful as a gene source used for gene therapy.

[0265] All publications, patents and patent applications cited herein are incorporated herein in their entirety.

The application's sequence listing, which the Patent Office published only in electronic form, follows.

SEQUENCE LISTING (182 sequences)

SEQ ID NO: 1 - protein, 167 aa, Homo sapiens
MSGLITIVVLLGIAFVVYKLFLSDGQYSPPPYSEYPPFSHRYQRFTNSAGPPPPGFKSEFTGPQNTGHGATSGFGSAFTGQQGYENSGPGFWTGLGTGGILGYLFGSNRAATPFSDSWYYPSYPPSYPGTWNRAYSPLHGGSGSYSVCSNSDTKTRTASGYGGTRRR

SEQ ID NO: 2 - DNA, 1472 bp, Homo sapiens
  CDS (194)..(694)
aaaaactgtggtgagctgtgaaggctatgagtcctctgaagaccagtatgtactaagaggttcttgtggcttggagtataatttagattatacagaacttggcctgcagaaactgaaggagtctggaaagcagcacggctttgcctctttctctgattattattataagtggtcctcggcggattcctgtaacatgagtggattgattaccatcgtggtactccttgggatcgcctttgtagtctataagctgttcctgagtgacgggcagtattctcctccaccgtactctgagtatcctccattttcccaccgttaccagagattcaccaactcagcaggacctcctcccccaggctttaagtctgagttcacaggaccacagaatactggccatggtgcaacttctggttttggcagtgcttttacaggacaacaaggatatgaaaattcaggaccagggttctggacaggcttgggaactggtggaatactaggatatttgtttggcagcaatagagcggcaacacccttctcagactcgtggtactacccgtcctatcctccctcctaccctggcacgtggaatagggcttactcaccccttcatggaggctcgggcagctattcggtatgttcaaactcagacacgaaaaccagaactgcatcaggatatggtggtaccaggagacgataaagtagaaagttggagtcaaacactggatgcagaaattttggatttttcatcactttctctttagaaaaaaagtactacctgttaacaattgggaaaaggggatattcaaaagttcggtggtgttatgtccagtgtagctttttgtattctattatttgaggctaaaagttgatgtgtgacaaaatacttatgtgttgtatgtcagtgtaacatgcagatgtatattgcagtttttgaaagtgatcattactgtggaatgctaaaaatacattaatttctaaaacctgtgatgccctaagaagcattaagaatgaaggtgttgtactaatagaaactaagtacagaaaatttcagttttaggtggttgtagctgatgagttattacctcatagagactgtaatattctatttggtattatattatttgatgtttgctgttcttcaaacatttaaatcaagctttggactaattatgctaatttgtgagttctgatcacttttgagctctgaagctttgaatcattcagtggtggagatggccttctggtaactgaatattaccttctgtaggaaaaggtggaaaataagcatctagaaggttgttgtgaatgactctgtgctggcaaaaatgcttgaaacctctatatttctttcgttcataagaggtaaaggtcaaatttttcaacaaaagtcttttaataacaaaagcatgcagttctctgtgaaatctcaaatattgttgtaatagtctgtttcaatcttaaaaagaatcaat

SEQ ID NO: 3 - protein, 339 aa, Homo sapiens
MAAACGPGAAGYCLLLGLHLFLLTAGPALGWNDPDRMLLRDVKALTLHYDRYTTSRRLDPIPQLKCVGGTAGCDSYTPKVIQCQNKGWDGYDVQWECKTDLDIAYKFGKTVVSCEGYESSEDQYVLRGSCGLEYNLDYTELGLQKLKESGKQHGFASFSDYYYKWSSADSCNMSGLITIVVLLGIAFVVYKLFLSDGQYSPPPYSEYPPFSHRYQRFTNSAGPPPPGFKSEFTGPQNTGHGATSGFGSAFTGQQGYENSGPGFWTGLGTGGILGYLFGSNRAATPFSDSWYYPSYPPSYPGTWNRAYSPLHGGSGSYSVCSNSDTKTRTASGYGGTRRR

SEQ ID NO: 4 - DNA, 1924 bp, Homo sapiens
  CDS (115)..(1131)
gttccttcgccgccgccaggggtagcggtgtagctgcgcagcgtcgcgcgcgctaccgcacccaggttcggcccgtaggcgtctggcagcccggcgccatcttcatcgagcgccatggccgcagcctgcgggccgggagcggccgggtactgcttgctcctcggcttgcatttgtttctgctgaccgcgggccctgccctgggctggaacgaccctgacagaatgttgctgcgggatgtaaaagctcttaccctccactatgaccgctataccacctcccgcaggctggatcccatcccacagttgaaatgtgttggaggcacagctggttgtgattcttataccccaaaagtcatacagtgtcagaacaaaggctgggatgggtatgatgtacagtgggaatgtaagacggacttagatattgcatacaaatttggaaaaactgtggtgagctgtgaaggctatgagtcctctgaagaccagtatgtactaagaggttcttgtggcttggagtataatttagattatacagaacttggcctgcagaaactgaaggagtctggaaagcagcacggctttgcctctttctctgattattattataagtggtcctcggcggattcctgtaacatgagtggattgattaccatcgtggtactccttgggatcgcctttgtagtctataagctgttcctgagtgacgggcagtattctcctccaccgtactctgagtatcctccattttcccaccgttaccagagattcaccaactcagcaggacctcctcccccaggctttaagtctgagttcacaggaccacagaatactggccatggtgcaacttctggttttggcagtgcttttacaggacaacaaggatatgaaaattcaggaccagggttctggacaggcttgggaactggtggaatactaggatatttgtttggcagcaatagagcggcaacacccttctcagactcgtggtactacccgtcctatcctccctcctaccctggcacgtggaatagggcttactcaccccttcatggaggctcgggcagctattcggtatgttcaaactcagacacgaaaaccagaactgcatcaggatatggtggtaccaggagacgataaagtagaaagttggagtcaaacactggatgcagaaattttggatttttcatcactttctctttagaaaaaaagtactacctgttaacaattgggaaaaggggatattcaaaagttcggtggtgttatgtccagtgtagctttttgtattctattatttgaggctaaaagttgatgtgtgacaaaatacttatgtgttgtatgtcagtgtaacatgcagatgtatattgcagtttttgaaagtgatcattactgtggaatgctaaaaatacattaatttctaaaacctgtgatgccctaagaagcattaagaatgaaggtgttgtactaatagaaactaagtacagaaaatttcagttttaggtggttgtagctgatgagttattacctcatagagactgtaatattctatttggtattatattatttgatgtttgctgttcttcaaacatttaaatcaagctttggactaattatgctaatttgtgagttctgatcacttttgagctctgaagctttgaatcattcagtggtggagatggccttctggtaactgaatattaccttctgtaggaaaaggtggaaaataagcatctagaaggttgttgtgaatgactctgtgctggcaaaaatgcttgaaacctctatatttctttcgttcataagaggtaaaggtcaaatttttcaacaaaagtcttttaataacaaaagcatgcagttctctgtgaaatctcaaatattgttgtaatagtctgtttcaatcttaaaaagaatcaataaaaacaaacaaggg

SEQ ID NO: 5 - protein, 127 aa, Homo sapiens
MAGAIIENMSTKKLCIVGGILLVFQIIAFLVGGLIAPGPTTAVSYMSVKCVDARKNHHKTKWFVPWGPNHCDKIRDIEEAIPREIEANDIVFSVHIPLPHMEMSPWFQFMLFILQLDIAFKLNNQIS

SEQ ID NO: 6 - DNA, 702 bp, Homo sapiens
  CDS (225)..(605)
acaatcacagctccgggcattgggggaacccgagccggctgcgccgggggaatccgtgcgggcgtcttccgtcccggtcccatcctcgccgcgctccagcacctctgaagttttgcagcgcccagaaaggaggcgaggaaggagggagtgtgtgagaggagggagcaaaaagctcaccctaaaacatttatttcaaggagaaaagaaaaagggggggcgcaaaaatggctggggcaattatagaaaacatgagcaccaagaagctgtgcattgttggtgggattctgctcgtgttccaaatcatcgcctttctggtgggaggcttgattgctccagggcccacaacggcagtgtcctacatgtcggtgaaatgtgtggatgcccgtaagaaccatcacaagacaaaatggttcgtgccttggggacccaatcattgtgacaagatccgagacattgaagaggcaattccaagggaaattgaagccaatgacatcgtgttttctgttcacattcccctcccccacatggagatgagtccttggttccaattcatgctgtttatcctgcagctggacattgccttcaagctaaacaaccaaatcagttaagtgtactctcctctcatccctttcttccctttgagcattgccctctttgggttctttttgagccaattctaataaaagtaaaaatggtaatagt

SEQ ID NO: 7 - protein, 233 aa, Homo sapiens
MAGAIIENMSTKKLCIVGGILLVFQIIAFLVGGLIAPGPTTAVSYMSVKCVDARKNHHKTKWFVPWGPNHCDKIRDIEEAIPREIEANDIVFSVHIPLPHMEMSPWFQFMLFILQLDIAFKLNNQIRENAEVSMDVSLAYRDDAFAEWTEMAHERVPRKLKCTFTSPKTPEHEGRYYECDVLPYAQHLHHYGVVLEEDHHDVPTPSASGKSHLCPWDFHDLYQYPSGMVFHRV

SEQ ID NO: 8 - DNA, 2409 bp, Homo sapiens
  CDS (225)..(923)
acaatcacagctccgggcattgggggaacccgagccggctgcgccgggggaatccgtgcgggcgccttccgtcccggtcccatcctcgccgcgctccagcacctctgaagttttgcagcgcccagaaaggaggcgaggaaggagggagtgtgtgagaggagggagcaaaaagctcaccctaaaacatttatttcaaggagaaaagaaaaagggggggcgcaaaaatggctggggcaattatagaaaacatgagcaccaagaagctgtgcattgttggtgggattctgctcgtgttccaaatcatcgcctttctggtgggaggcttgattgctccagggcccacaacggcagtgtcctacatgtcggtgaaatgtgtggatgcccgtaagaaccatcacaagacaaaatggttcgtgccttggggacccaatcattgtgacaagatccgagacattgaagaggcaattccaagggaaattgaagccaatgacatcgtgttttctgttcacattcccctcccccacatggagatgagtccttggttccaattcatgctgtttatcctgcagctggacattgccttcaagctaaacaaccaaatcagagaaaatgcagaagtctccatggacgtttccctggcttaccgtgatgacgcgtttgctgagtggactgaaatggcccatgaaagagtaccacggaaactcaaatgcaccttcacatctcccaagactccagagcatgagggccgttactatgaatgtgatgtccttccttacgcccagcatcttcatcattatggtgtggtattggaggaggatcaccatgatgtcccgacccccagtgcttctggaaaaagtcatctttgcccttgggatttccatgacctttatcaatatcccagtggaatggttttccatcgggtttgactggacctggatgctgctgtttggtgacatccgacagggcatcttctatgcgatgcttctgtccttctggatcatcttctgtggcgagcacatgatggatcagcacgagcggaaccacatcgcagggtattggaagcaagtcggacccattgccgttggctccttctgcctcttcatatttgacatgtgtgagagaggggtacaactcacgaatcccttctacagtatctggactacagacattggaacagagctggccatggccttcatcatcgtggctggaatctgcctctgcctctacttcctgtttctatgcttcatggtatttcaggtgtttcggaacatcagtgggaagcagtccagcctgccagctatgagcaaagtccggcggctacactatgaggggctaatttttaggttcaagttcctcatgcttatcaccttggcctgcgctgccatgactgtcatcttcttcatcgttagtcaggtaacggaaggccattggaaatggggcggcgtcacagtccaagtgaacagtgcctttttcacaggcatctatgggatgtggaatctgtatgtctttgctctgatgttcttgtatgcaccatcccataaaaactatggagaagaccagtccaatggcgatctgggtgtccatagtggggaagaactccagctcaccaccactatcacccatgtggacggacccactgagatctacaagttgacccgcaaggaggcccaggagtaggaggctgcagcgcccggctgggacggtctctccataccccagcccctctaactagagtggggagcatgccagagagagctcaatgtacaaatgaatgcctcatggctcttagctgtggtttcttggaccagcggcatggacatttgtcagtttgccttctgacggtagcttttggaggaagattcctgcagccactaatgcattgtgtatgataacaaaaactctggtatgacacattttctgtgatcattgttaattagtgacatagtaacatctgtagcagctggttagtaaacctcatgtgggggtggggtgggggtgtattccttgggggatggtttgggccgaatggggagtggaatatttgacatttttcctgttttaaattctaggatagattttaacatcctttgcggtcccagtccaaggtaggctggtgtcatagtcttctcactcctaatccatgaccactgtttttttcctatttatatcaccaggtagcccactgagttaatatttaagttgtcaatagataagtgtccctgttttgtggcataatataactgaatttcatgagaagatttattccaccaggggtatttcagctttgaaaccaaatctgtgtatctaatactaaccaatctgttggatgtgggttttaaaaaatgtttgctaaactacccaagtaagatttactgtattaaatggccttcgggtctgaaaagctttttt

SEQ ID NO: 9 - protein, 198 aa, Homo sapiens
MATLWGGLLRLGSLLSLSCLALSVLLLAQLSDAAKNFEDVRCKCICPPYKENSGHIYNKNISQKDCDCLHVVEPMPVRGPDVEAYCLRCECKYEERSSVTIKVTIIIYLSILGLLLLYMVYLTLVEPILKRRLFGHAQLIQSDDDIGDHQPFANAHDVLARSRSRANVLNKVEYAQQRWKLQVQEQRKSVFDRHVVLS

SEQ ID NO: 10 - DNA, 1498 bp, Homo sapiens
  CDS (86)..(679)
gtgcctgagcctgagcctgagcctgagcccgagccgggagccggtcgcgggggctccgggctgtgggaccgctgggcccccagcgatggcgaccctgtggggaggccttcttcggcttggctccttgctcagcctgtcgtgcctggcgctttccgtgctgctgctggcgcagctgtcagacgccgccaagaatttcgaggatgtcagatgtaaatgtatctgccctccctataaagaaaattctgggcatatttataataagaacatatctcagaaagattgtgattgccttcatgttgtggagcccatgcctgtgcgggggcctgatgtagaagcatactgtctacgctgtgaatgcaaatatgaagaaagaagctctgtcacaatcaaggttaccattataatttatctctccattttgggccttctacttctgtacatggtatatcttactctggttgagcccatactgaagaggcgcctctttggacatgcacagttgatacagagtgatgatgatattggggatcaccagccttttgcaaatgcacacgatgtgctagcccgctcccgcagtcgagccaacgtgctgaacaaggtagaatatgcacagcagcgctggaagcttcaagtccaagagcagcgaaagtctgtctttgaccggcatgttgtcctcagctaattgggaattgaattcaaggtgactagaaagaaacaggcagacaactggaaagaactgactgggttttgctgggtttcattttaataccttgttgatttcaccaactgttgctggaagattcaaaactggaagcaaaaacttgcttgatttttttttcttgttaacgtaataatagagacatttttaaaagcacacagctcaaagtcagccaataagtcttttcctatttgtgacttttactaataaaaataaatctgcctgtaaattatcttgaagtcctttacctggaacaagcactctctttttcaccacatagttttaacttgactttcaagataattttcagggtttttgttgttgttgttttttgtttgtttgttttggtgggagaggggagggatgcctgggaagtggttaacaacttttttcaagtcactttactaaacaaacttttgtaaatagaccttaccttctattttcgagtttcatttatattttgcagtgtagccagcctcatcaaagagctgacttactcatttgacttttgcactgactgtattatctgggtatctgctgtgtctgcacttcatggtaaacgggatctaaaatgcctggtggcttttcacaaaaagcagattttcttcatgtactgtgatgtctgatgcaatgcatcctagaacaaactggccatttgctagtttactctaaagactaaacatagtcttggtgtgtgtggtcttactcatcttctagtacctttaaggacaaatcctaaggacttggacacttgcaataaagaaattttattttaaaccc

SEQ ID NO: 11 - protein, 221 aa, Homo sapiens
MALALAALAAVEPACGSRYQQLQNEEESGEPEQAAGDAPPPYSSISAESAAYFDYKDESGFPKPPSYNVATTLPSYDEAERTKAEATIPLVPGRDEDFVGRDDFDDADQLRIGNDGIFMLTFFMAFLFNWIGFFLSFCLTTSAAGRYGAISGFGLSLIKWILIVRFSTYFPGYFDGQYWLWWVFLVLGFLLFLRGFINYAKVRKMPETFSNLPRTRVLFIY

SEQ ID NO: 12 - DNA, 1864 bp, Homo sapiens
  CDS (153)..(815)
ctgagaagagcgtctcgcccgggagcggcggcggccatcgagacccacccaaggcgcgtccccctcggcctcccagcgctcccaagccgcagcggccgcgccccttcagctagctcgctcgctcgctctgcttccctgctgccggctgcgccatggcgttggcgttggcggcgctggcggcggtcgagccggcctgcggcagccggtaccagcagttgcagaatgaagaagagtctggagaacctgaacaggctgcaggtgatgctcctccaccttacagcagcatttctgcagagagcgcagcatattttgactacaaggatgagtctgggtttccaaagcccccatcttacaatgtagctacaacactgcccagttatgatgaagcggagaggaccaaggctgaagctactatccctttggttcctgggagagatgaggattttgtgggtcgggatgattttgatgatgctgaccagctgaggataggaaatgatgggattttcatgttaacttttttcatggcattcctctttaactggattgggtttttcctgtctttttgcctgaccacttcagctgcaggaaggtatggggccatttcaggatttggtctctctctaattaaatggatcctgattgtcaggttttccacctatttccctggatattttgatggtcagtactggctctggtgggtgttccttgttttaggctttctcctgtttctcagaggatttatcaattatgcaaaagttcggaagatgccagaaactttctcaaatctccccaggaccagagttctctttatttattaaagatgttttctggcaaaggccttcctgcatttatgaattctctctcaagaagcaagagaacacctgcaggaagtgaatcaagatgcagaacacagaggaataatcacctgctttaaaaaaataaagtactgttgaaaagatcatttctctctatttgttcctaggtgtaaaattttaatagttaatgcagaattctgtaatcattgaatcattagtggttaatgtttgaaaaagctcttgcaatcaagtctgtgatgtattaataatgccttatatattgtttgtagtcattttaagtagcatgagccatgtccctgtagtcggtagggggcagtcttgctttattcatcctccatctcaaaatgaacttggaattaaatattgtaagatatgtataatgctggccattttaaaggggttttctcaaaagttaaacttttgctatgactgtgtttttgcacataatccatatttgctgttcaagttaatctagaaatttattcaattctgtatgaacacctggaagcaaaatcatagtgcaaaaatacatttaaggtgtggtcaaaaataagtctttaattggtaaataataagcattaattttttatagcctgtattcacaattctgcggtaccttattgtacctaagggattctaaaggtgttgtcactgtataaaacagaaagcactaggatacaaatgaagcttaattactaaaatgtaattcttgacactctttctataattagcgttcttcacccccacccccacccccaccccccttattttccttttgtctcctggtgattaggccaaagtctgggagtaaggagaggattaggtacttaggagcaaagaaagaagtagcttggaacttttgagatgatccctaacatactgtactacttgcttttacaatgtgttagcagaaaccagtgggttataatgtagaatgatgtgctttctgcccaagtggtaattcatcttggtttgctatgttaaaactgtaaatacaacagaacattaataaatatctcttgtgtagc

SEQ ID NO: 13 - protein, 242 aa, Homo sapiens
MDHHQPGTGRYQVLLNEEDNSESSAIEQPPTSNPAPQIVQAASSAPALETDSSPPPYSSITVEVPTTSDTEVYGEFYPVPPPYSVATSLPTYDEAEKAKAAAMAAAAAETSQRIQEEECPPRDDFSDADQLRVGNDGIFMLAFFMAFIFNWLGFCLSFCITNTIAGRYGAICGFGLSLIKWILIVRFSDYFTGYFNGQYWLWWIFLVLGLLLFFRGFVNYLKVRNMSESMAAAHRTRYFFLL

SEQ ID NO: 14 - DNA, 2324 bp, Homo sapiens
  CDS (13)..(738)
gagccgggcaggatggatcaccaccagccggggactgggcgctaccaggtgcttcttaatgaagaggataactcagaatcatcggctatagagcagccacctacttcaaacccagcaccgcagattgtgcaggctgcgtcttcagcaccagcacttgaaactgactcttcccctccaccatatagtagtattactgtggaagtacctacaacttcagatacagaagtttacggtgagttttatcccgtgccacctccctatagcgttgctacctctcttcctacatacgatgaagctgagaaggctaaagctgctgcaatggcagctgcagcagcagaaacatctcaaagaattcaggaggaagagtgtccaccaagagatgacttcagtgatgcagaccagctcagagtggggaatgatggcattttcatgctggcatttttcatggcatttattttcaactggcttggattttgtttatccttctgtatcaccaataccatagctggaaggtatggtgctatctgcggatttggcctttccttgatcaaatggatccttattgtcaggttttctgattattttactggatatttcaatggacagtattggctttggtggatatttcttgtacttggcctgctccttttcttcagaggatttgttaattatctaaaagtcagaaacatgtctgaaagtatggcagctgctcatagaacaaggtatttcttcttattgtagagactgcatcaacccgacattcctttcttataccaatgtgaaatttccagatcatctgtaaacctacaactttaatagaagactactaataacagaagacaaattagtgaagaaaagacggagtttcgaaattgaatggcagggtggtttttgcttacaagccatttctgttcattctttaagtatctatatttcatttgttttgcacatatgcatatgtgcccatttaagatatttgcatatacttgatagaaaccataaagttgtagcagttaagtccagtcacatttggttaatcagtgtttgatataattgaaagagttgagtggataaacagtcttccagcttgtaaatgccattgacttctgacctgacatttagtataataaaaatgaaattcttaaccatgtcaaatgatttagtttctggctcttagactcatctggcagttctacacatgaaacatcttttgttatatagggtgtattgaaacctgcagtgctgattattagaaaggatttgtcagatttttgaacatgatatttacattattatttaggaaaactcttcctgtaaataaccatgcataacttactttctgcaatgttttcttagaaattgtgtccagatagctttcactaattttaaattaagtgaactaaatatatatgtgtatatgtatacacatatatatacacacacacatatatatatttagaaacgtgagtgttaaagatagaatttgttttaggacaaattttaagaaaatgtgggaataccaaatgtcctttataagaaaaataaattttattttaagggacatactagttttagggattttcagatgggaagctgcatttttaggattgcccatcttaagagatcttgcaggaagagattgtattagatattatatttatttcatttaagataattttcaaagttaattttctaaataagataattctcatttgtgtttgtcttttaaaaggccaataaaatatctttcagtatcattgtaataattttttagagtttaatttgtaaagcttagcaaataaaatcttgtactatgaatagcttcttgctttatgactttaggattaacttgtaaaaaacatatcctgaactgagatatgcaaaatactcattttcaagttatggaaatgtgtttgtggcatataggactgtggggtctgtgtgtgtagtgagagtgtgtagccactattataactggaatttaatttacattcataaactactatatttcccatcttgcaaatcattttatgtctcatctgtttttcctttcggttatatctttggttttgaataccaacatttaaaatgatggtattttatcttttaaacttaaaaattatttaatacagctatatggaccttataaaattgatttcttatttattattagacattactactaaaaggtacatctaactattcagggacatttttccatttccaaaaaataaaatttattatgctttataacctcttctgtattttctaattttttcattgtctttgataaataaaacagttttgttttgctaatatagcct

SEQ ID NO: 15 - protein, 242 aa, Homo sapiens
MDHHQPGTGRYQVLLNEEDNSESSAIEQPPTSNPAPQIVQAVSSAPALETDSSPPPYSSITVEVPTTSDTEVYGEFYPVPPPYSVATSLPTYDEAEKAKAAAMAAAAAETSQRIQEEECPPRDDFSDADQLRVGNDGIFMLAFFMAFIFNWLGFCLSFCITNTIAGRYGAICGFGLSLIKWILIVRFSDYFTGYFNGQYWLWWIFLVLGLLLFFRGFVNYLKVRNMSESMAAAHRTRYFFLL

SEQ ID NO: 16 - DNA, 2324 bp, Homo sapiens
  CDS (13)..(738)
gagccgggcaggatggatcaccaccagccggggactgggcgctaccaggtgcttcttaatgaagaggataactcagaatcatcggctatagagcagccacctacttcaaacccagcaccgcagattgtgcaggctgtgtcttcagcaccagcacttgaaactgactcttcccctccaccatatagtagtattactgtggaagtacctacaacttcagatacagaagtttacggtgagttttatcccgtgccacctccctatagcgttgctacctctcttcctacatacgatgaagctgagaaggctaaagctgctgcaatggcagctgcagcagcagaaacatctcaaagaattcaggaggaagagtgtccaccaagagatgacttcagtgatgcagaccagctcagagtggggaatgatggcattttcatgctggcatttttcatggcatttattttcaactggcttggattttgtttatccttctgtatcaccaataccatagctggaaggtatggtgctatctgcggatttggcctttccttgatcaaatggatccttattgtcaggttttctgattattttactggatatttcaatggacagtattggctttggtggatatttcttgtacttggcctgctccttttcttcagaggatttgttaattatctaaaagtcagaaacatgtctgaaagtatggcagctgctcatagaacaaggtatttcttcttattgtagagactgcatcaacccgacattcctttcttataccaatgtgaaatttccagatcatctgtaaacctacaactttaatagaagactactaataacagaagacaaattagtgaagaaaagacggagtttcgaaattgaatggcagggtggtttttgcttacaagccatttctgttcattctttaagtatctatatttcatttgttttgcacatatgcatatgtgcccatttaagatatttgcatatacttgatagaaaccataaagttgtagcagttaagtccagtcacatttggttaatcagtgtttgatataattgaaagagttgagtggataaacagtcttccagcttgtaaatgccattgacttctgacctgacatttagtataataaaaatgaaattcttaaccatgtcaaatgatttagtttctggctcttagactcatctggcagttctacacatgaaacatcttttgttatatagggtgtattgaaacctgcagtgctgattattagaaaggatttgtcagatttttgaacatgatatttacattattatttaggaaaactcttcctgtaaataaccatgcataacttactttctgcaatgttttcttagaaattgtgtccagatagctttcactaattttaaattaagtgaactaaatatatatgtgtatatgtatacacatatatatacacacacacatatatatatttagaaacgtgagtgttaaagatagaatttgttttaggacaaattttaagaaaatgtgggaataccaaatgtcctttataagaaaaataaattttattttaagggacatactagttttagggattttcagatgggaagctgcatttttaggattgcccatcttaagagatcttgcaggaagagattgtattagatattatatttatttcatttaagataattttcaaagttaattttctaaataagataattctcatttgtgtttgtcttttaaaaggccaataaaatatctttcagtatcattgtaataattttttagagtttaatttgtaaagcttagcaaataaaatcttgtactatgaatagcttcttgctttatgactttaggattaacttgtaaaaaacatatcctgaactgagatatgcaaaatactcattttcaagttatggaaatgtgtttgtggcatataggactgtggggtctgtgtgtgtagtgagagtgtgtagccactattataactggaatttaatttacattcataaactactatatttcccatcttgcaaatcattttatgtctcatctgtttttcctttcggttatatctttggttttgaataccaacatttaaaatgatggtattttatcttttaaacttaaaaattatttaatacagctatatggaccttataaaattgatttcttatttattattagacattactactaaaaggtacatctaactattcagggacatttttccatttccaaaaaataaaatttattatgctttataacctcttctgtattttctaattttttcattgtctttgataaataaaacagttttgttttgctaatatagcct

SEQ ID NO: 17 - protein, 336 aa, Homo sapiens
MARRRSQRVCASGPSMLNSARGAPELLRGTATNAEVSAAAAGATGSEELPPGDRGCRNGGGRGPAATTSSTGVAVGAEHGEDSLSRKPDPEPGRMDHHQPGTGRYQVLLNEEDNSESSAIEQPPTSNPAPQIVQAVSSAPALETDSSPPPYSSITVEVPTTSDTEVYGEFYPVPPPYSVATSLPTYDEAEKAKAAAMAAAAAETSQRIQEEECPPRDDFSDADQLRVGNDGIFMLAFFMAFIFNWLGFCLSFCITNTIAGRYGAICGFGLSLIKWILIVRFSDYFTGYFNGQYWLWWIFLVLGLLLFFRGFVNYLKVRNMSESMAAAHRTRYFFLL

SEQ ID NO: 18 - DNA, 2636 bp, Homo sapiens
  CDS (53)..(1060)
cttacttttccatctcctcccacccagctataccctcccactggcggcgcggatggcacgccggcggagccagcgagtctgcgcgagcggtccgagcatgctcaatagcgcgcgcggcgccccggagcttctccgcggaaccgcgaccaacgcggaggtctcggcggccgctgcgggagccacaggaagtgaagagcttccgccgggagaccgcggctgcaggaacggaggcggaaggggccctgcggcgacgacgtcgtcgacgggggtggccgtgggagctgagcacggagaagactccctctctcggaagccggatcccgagccgggcaggatggatcaccaccagccggggactgggcgctaccaggtgcttcttaatgaagaggataactcagaatcatcggctatagagcagccacctacttcaaacccagcaccgcagattgtgcaggctgtgtcttcagcaccagcacttgaaactgactcttcccctccaccatatagtagtattactgtggaagtacctacaacttcagatacagaagtttacggtgagttttatcccgtgccacctccctatagcgttgctacctctcttcctacatacgatgaagctgagaaggctaaagctgctgcaatggcagctgcagcagcagaaacatctcaaagaattcaggaggaagagtgtccaccaagagatgacttcagtgatgcagaccagctcagagtggggaatgatggcattttcatgctggcatttttcatggcatttattttcaactggcttggattttgtttatccttctgtatcaccaataccatagctggaaggtatggtgctatctgcggatttggcctttccttgatcaaatggatccttattgtcaggttttctgattattttactggatatttcaatggacagtattggctttggtggatatttcttgtacttggcctgctccttttcttcagaggatttgttaattatctaaaagtcagaaacatgtctgaaagtatggcagctgctcatagaacaaggtatttcttcttattgtagagactgcatcaacccgacattcctttcttataccaatgtgaaatttccagatcatctgtaaacctacaactttaatagaagactactaataacagaagacaaattagtgaagaaaagacggagtttcgaaattgaatggcagggtggtttttgcttacaagccatttctgttcattctttaagtatctatatttcatttgttttgcacatatgcatatgtgcccatttaagatatttgcatatacttgatagaaaccataaagttgtagcagttaagtccagtcacatttggttaatcagtgtttgatataattgaaagagttgagtggataaacagtcttccagcttgtaaatgccattgacttctgacctgacatttagtataataaaaatgaaattcttaaccatgtcaaatgatttagtttctggctcttagactcatctggcagttctacacatgaaacatcttttgttatataaggtgtattgaaacctgcagtgctgattattagaaaggatttgtcagatttttgaacatgatatttacattattatttaggaaaactcttcctgtaaataaccatgcataacttactttctgcaatgttttcttagaaattgtgtccagatagctttcactaattttaaattaagtgaactaaatatatatgtgtatatgtatacacatatatatacacacacacatatatatatttagaaacgtgagtgttaaagatagaatttgttttaggacaaattttaagaaaatgtgggaataccaaatgtcctttataagaaaaataaattttgttttaagggacataccagttttagggattttcagatgggaagctgcatttttaggattgcccatcttaagagatcttgcaggaagagattgtattagatattatatttatttcatttaagataattttcaaagttaattttctaaataagataattctcatttgtgtttgtcttttaaaaggccaataaaatatctttcagtatcattgtaataattttttagagtttaatttgtaaagcttagcaaataaaatcttgtactatgaatagcttcttgctttatgactttaggattaacttgtaaaaaacatatcctgaactgagatatgcaaaatactcattttcaagttatggaaatgtgtttgtggcatataggactgtggggtctgtgtgtgtagtgagagtgtgtagccactattataactggaatttaatttacattcataaactactatatttcccatcttgcaaatcattttatgtctcatctgtttttcctttcggttatatctttggttttgaataccaacatttaaaatgatggtattttatcttttaaacttaaaaattatttaatacagctatatggaccttataaaattgatttcttatttattattagacattactactaaaaggtacatctaactattcagggacatttttccatttccaaaaaataaaatttattatgctttataacctcttctgtattttctaattttttcattgtctttgataaataaaacagttttgttttgct

SEQ ID NO: 19 - protein, 336 aa, Homo sapiens
MARRRSQRVCASGPSMLNSARGAPELLRGTATNAEVSAAAAGATGSEELPPGDRGCRNGGGRGPAATTSSTGVAVGAEHGEDSLSRKPDPEPGRMDHHQPGTGRYQVLLNEEDNSESSAIEQPPTSNPAPQIVQAASSAPALETDSSPPPYSSITVEVPTTSDTEVYGEFYPVPPPYSVATSLPTYDEAEKAKAAAMAAAAAETSQRIQEEECPPRDDFSDADQLRVGNDGIFMLAFFMAFIFNWLGFCLSFCITNTIAGRYGAICGFGLSLIKWILIVRFSDYFTGYFNGQYWLWWIFLVLGLLLFFRGFVNYLKVRNMSESMAAAHRTRYFFLL

SEQ ID NO: 20 - DNA, 2636 bp, Homo sapiens
  CDS (53)..(1060)
cttacttttccatctcctcccacccagctataccctcccactggcggcgcggatggcacgccggcggagccagcgagtctgcgcgagcggtccgagcatgctcaatagcgcgcgcggcgccccggagcttctccgcggaaccgcgaccaacgcggaggtctcggcggccgctgcgggagccacaggaagtgaagagcttccgccgggagaccgcggctgcaggaacggaggcggaaggggccctgcggcgacgacgtcgtcgacgggggtggccgtgggagctgagcacggagaagactccctctctcggaagccggatcccgagccgggcaggatggatcaccaccagccggggactgggcgctaccaggtgcttcttaatgaagaggataactcagaatcatcggctatagagcagccacctacttcaaacccagcaccgcagattgtgcaggctgcgtcttcagcaccagcacttgaaactgactcttcccctccaccatatagtagtattactgtggaagtacctacaacttcagatacagaagtttacggtgagttttatcccgtgccacctccctatagcgttgctacctctcttcctacatacgatgaagctgagaaggctaaagctgctgcaatggcagctgcagcagcagaaacatctcaaagaattcaggaggaagagtgtccaccaagagatgacttcagtgatgcagaccagctcagagtggggaatgatggcattttcatgctggcatttttcatggcatttattttcaactggcttggattttgtttatccttctgtatcaccaataccatagctggaaggtatggtgctatctgcggatttggcctttccttgatcaaatggatccttattgtcaggttttctgattattttactggatatttcaatggacagtattggctttggtggatatttcttgtacttggcctgctccttttcttcagaggatttgttaattatctaaaagtcagaaacatgtctgaaagtatggcagctgctcatagaacaaggtatttcttcttattgtagagactgcatcaacccgacattcctttcttataccaatgtgaaatttccagatcatctgtaaacctacaactttaatagaagactactaataacagaagacaaattagtgaagaaaagacggagtttcgaaattgaatggcagggtggtttttgcttacaagccatttctgttcattctttaagtatctatatttcatttgttttgcacatatgcatatgtgcccatttaagatatttgcatatacttgatagaaaccataaagttgtagcagttaagtccagtcacatttggttaatcagtgtttgatataattgaaagagttgagtggataaacagtcttccagcttgtaaatgccattgacttctgacctgacatttagtataataaaaatgaaattcttaaccatgtcaaatgatttagtttctggctcttagactcatctggcagttctacacatgaaacatcttttgttatataaggtgtattgaaacctgcagtgctgattattagaaaggatttgtcagatttttgaacatgatatttacattattatttaggaaaactcttcctgtaaataaccatgcataacttactttctgcaatgttttcttagaaattgtgtccagatagctttcactaattttaaattaagtgaactaaatatatatgtgtatatgtatacacatatatatacacacacacatatatatatttagaaacgtgagtgttaaagatagaatttgttttaggacaaattttaagaaaatgtgggaataccaaatgtcctttataagaaaaataaattttgttttaagggacataccagttttagggattttcagatgggaagctgcatttttaggattgcccatcttaagagatcttgcaggaagagattgtattagatattatatttatttcatttaagataattttcaaagttaattttctaaataagataattctcatttgtgtttgtcttttaaaaggccaataaaatatctttcagtatcattgtaataattttttagagtttaatttgtaaagcttagcaaataaaatcttgtactatgaatagcttcttgctttatgactttaggattaacttgtaaaaaacatatcctgaactgagatatgcaaaatactcattttcaagttatggaaatgtgtttgtggcatataggactgtggggtctgtgtgtgtagtgagagtgtgtagccactattataactggaatttaatttacattcataaactactatatttcccatcttgcaaatcattttatgtctcatctgtttttcctttcggttatatctttggttttgaataccaacatttaaaatgatggtattttatcttttaaacttaaaaattatttaatacagctatatggaccttataaaattgatttcttatttattattagacattactactaaaaggtacatctaactattcagggacatttttccatttccaaaaaataaaatttattatgctttataacctcttctgtattttctaattttttcattgtctttgataaataaaacagttttgttttgct

SEQ ID NO: 21 - protein, 76 aa, Homo sapiens
MVCIPCIVIPVLLWIYKKFLEPYIYPLVSPFVSRIWPKKAIQESNDTNKGKVNFKGADMNGLPTKGPTEICDKKKD

SEQ ID NO: 22 - DNA, 1085 bp, Homo sapiens
  CDS (176)..(403)
gggctagcggcctgggttgggctttgtagctgctccgcaggcccagcccgggccgcgctcgcagagtcctaggcggtgcgcggcctcctgcctcctccctcctcggcggtcgcggcccgccggcctccgcggtgcctgccttcgctctcaggttgaggagctcaagcttgggaaaatggtgtgcattccttgtatcgtcattccagttctgctctggatctacaaaaaattcctggagccatatatataccctctggtttcccccttcgttagtcgtatatggcctaagaaagcaatacaagaatccaatgatacaaacaaaggcaaagtaaactttaagggtgcagacatgaatggattaccaacaaaaggaccaacagaaatctgtgataaaaagaaagactaaagaaattttcctaaaggaccccatcatttaaaaaatggacctgataatatgaagcatcttccttgtaattgtctctgacctttttatctgagaccggaattcaggataggagtctagatatttacctgatactaatcaggaaatatatgatatccgtatttaaaatgtagttagttatatttaatgacctcattcctaagttcctttttcgttaatgtagctttcatttctgttattgctgtttgaataatatgattaaatagaaggtttgtgccagtagacattatgttactaaatcagcactttaaaatctttggttctctaattcatatgaatttgctgtttgctctaatttctttgggctcttctaatttgagtggagtacaattttgttgtgaaacagtccagtgaaactgtgcagggaaatgaaggtagaattttgggaggtaataatgatgtgaaacataaagatttaataattactgtccaacacagtggagcagcttgtccacaaatatagtaattactatttattgctctaaggaagattaaaaaaagatagggaaaagggggaaacttctttgaaaaatgaaacatctgttacattaatgtctaattataaaattttaatccttactgcatttcttctgttcctacaaatgtattaaacattcagttt

SEQ ID NO: 23 - protein, 84 aa, Homo sapiens
MAIKFLEVIKPFCVILPEIQKPERKIQFKEKVLWTAITLFIFLVCCQIPLFGIMSSDSADPFYWMRVILASNRGTLMEHSLSGL

SEQ ID NO: 24 - DNA, 1593 bp, Homo sapiens
  CDS (65)..(316)
agcgtcgcctcacgcggagcagagctgagctgaagcgggacccggagcccgagcagccgccgccatggcaatcaaatttctggaagtcatcaagcccttctgtgtcatcctgccggaaattcagaagccagagaggaagattcagtttaaggagaaagtgctgtggaccgctatcaccctctttatcttcttagtgtgctgccagattcccctgtttgggatcatgtcttcagattcagctgaccctttctattggatgagagtgattctagcctctaacagaggcacattgatggagcactctctctctggcctttagggagtcccctcttaggacaggcactgcccagcagcaagggcagcagagttgggtgctaagatcctgaggagctcgaggtttcgagctggctttagacattggtgggaccaaggatgttttgcaggatgccctgatcctaagaagggggcctgggggtgcgtgcagcctgtcggggagaccccactctgtgcacctattggctcttctagctgactcttctcgttgggcttagagtctgcctgtttctgctagctccgtgtttagtccacttgggtcatcagctctgccaagctgagcctggccaagctaggtggacagacccttgcagtgatgtccgtttgtccagattctgccagtcatcactggacacgtctcctcgcagctgccctagcaaggggagacattgtggtagctatcagacatggacagaaactgacttagtgctcacaagcccctacaccttctgggctgaagatcacccagctgtgttcagaattttcttactgtgcttaggactgcacgcaagtgagcagacaccaccgacttcctttctgcgtcaccagtgtcgtcagcagagagaggacagcacaggctcaaggttggtagtgaagtcaggttcggggtgcatgggctgtggtggtggtgatcagttgctccagtgtttgaaataagaagactcatgtttatgtctggaataagttctgtttgtgctgacaggtgaccttgctggcagtgctagccaggaaacagagtgaccaagggacaagaagggacttgcctaaagccacccagcaactcagcagcagaaccaagatgggccccaggctcctccatatggcccagggcttaccaccctatcacacgtggccttgtctagacccagtcctgagcaggggagaggctcttgagacctgatgccctcctacccacatggttctcccactgccctgtctgctctgctgctacagaggggcagggcctcccccagcccacgcttaggaatgcttggcctctggcaggcaggcagctgtacccaagctggtgggcagggggctggaaggcaccaggcctcaggaggagccccatagtcccgcctgcagcctgtaaccatcggctgggccctgcaaggcccacactcacgccctgtgggtgatggtcacggtgggtgggtgggggctgaccccagcttccaggggactgtcactgtggacgccaaaatggcataactgagataaggtgaataagtgacaaataaagccagttttttacaaggt

SEQ ID NO: 25 - protein, 179 aa, Homo sapiens
MAIKFLEVIKPFCVILPEIQKPERKIQFKEKVLWTAITLFIFLVCCQIPLFGIMSSDSADPVHAVVYIVFMLGSCAFFSKTWIEVSGSSAKDVAKQLKEQQMVMRGHRETSMVHELNRYIPTAAAFGGLCIGALSVLADFLGAIGSGTGILLAVTIIYQYFEIFVKEQSEVGSMGALLF

SEQ ID NO: 26 - DNA, 1820 bp, Homo sapiens
  CDS (114)..(650)
gtgtctctcggcggagctgctgtgcagtggaacgcgctgggccgcgggcagcgtcacctcacgcggagcagagctgagctgaagcgggacccggagcccgagcagccgccgccatggcaatcaaatttctggaagtcatcaagcccttctgtgtcatcctgccggaaattcagaagccagagaggaagattcagtttaaggagaaagtgctgtggaccgctatcaccctctttatcttcttagtgtgctgccagattcccctgtttgggatcatgtcttcagattcagctgacccggtccatgcagttgtatacatagtgttcatgctgggctcctgtgcattcttctccaaaacgtggattgaggtctcaggttcctctgccaaagatgttgcaaagcagctgaaggagcagcagatggtgatgagaggccaccgagagacctccatggtccatgaactcaaccggtacatccccacagccgcggcctttggtgggctgtgcatcggggccctctcggtcctggctgacttcctaggcgccattgggtctggaaccgggatcctgctcgcagtcacaatcatctaccagtactttgagatcttcgttaaggagcaaagcgaggttggcagcatgggggccctgctcttctgagcccgtctcccggacaggttgaggaagctgctccagaagcgcctcggaaggggagctctcatcatggcgcgtgctgctgcggcatatggacttttaataatgtttttgaatttcgtattctttcattccactgtgtaaagtgctagacattttccaatttaaaattttgctttttatcctggcactggcaaaaagaactgtgaaagtgaatttattcagccgactgccagagaagtgggaatggtataggattgtccccaagtgtccatgtaacttttgttttaacctttgcaccttctcagtgctgtatgcggctgcagccgtctcacctgtttccccacaaagggaatttctcactctggttggaagcacaaacactgaaatgtctacgtttcattttggcagtagggtgtgaagctgggagcagatcatgtatttcccggagacatgggaccttgctggcatgtctccttcacaatcaggcgtgggaatatctggcttaggactgtttctctctaagacaccattgttttcccttattttaaaagtgatttttttaaggacagaacttcttccaaaagagagggatggctttcccagaagacactctggagaccttgctggcagtgctagccaggaaacagagtgaccaagggacaagaagggacttgcctaaagccacccagcaactcagcagcagaaccaagatgggccccaggctcctccatatggcccagggcttaccaccctatcacacgtggccttgtctagacccagtcctgagcaggggagaggctcttgagacctgatgccctcctacccacatggttctcccactgccctgtctgctctgctgctacaraggggcagggcctcccccagcccacgcttaggaatgcttggcctctggcaggcaggcagctgtacccaagctggtgggcagggggctggaaggcaccaggcctcaggaggagccccatagtcccgcctgcagcctgtaaccatcggctgggccctgcaaggcccacactcacgccctgtgggtgatggtcacggtgggtgggtgggggctgaccccagcttccaggggactgtcactgtggacgccaaaatggcataactsasataaggtgaataagtgacaaataaagccagttttttacaagg

SEQ ID NO: 27 - protein, 279 aa, Homo sapiens
MEAVVNLYQEVMKHADPRIQGYPLMGSPLLMTSILLTYVYFVLSLGPRIMANRKPFQLRGFMIVYNFSLVALSLYIVYEFLMSGWLSTYTWRCDPVDYSNSPEALRMVRVAWLFLFSKFIELMDTVIFILRKKDGQVTFLHVFHHSVLPWSWWWGVKIAPGGMGSFHAMINSSVHVIMYLYYGLSAFGPVAQPYLWWKKHMTAIQLIQFVLVSLHISQYYFMSSCNYQYPVIIHLIWMYGTIFFMLFSNFWYHSYTKGKRLPRALQQNGAPGIAKVKAN

SEQ ID NO: 28 - DNA, 1472 bp, Homo sapiens
  CDS (119)..(955)
gcccagcagatgaggaagtggcaggcaggcaggctggccccggggacttctctctggccctgctccctccgagcgctccgccgttgcccgcctggcccctacggagtccttagccaggatggaggctgttgtgaacttgtaccaagaggtgatgaagcacgcagatccccggatccagggctaccctctgatggggtcccccttgctaatgacctccattctcctgacctacgtgtacttcgttctctcacttgggcctcgcatcatggctaatcggaagcccttccagctccgtggcttcatgattgtctacaacttctcactggtggcactctccctctacattgtctatgagttcctgatgtcgggctggctgagcacctatacctggcgctgtgaccctgtggactattccaacagccctgaggcacttaggatggttcgggtggcctggctcttcctcttctccaagttcattgagctgatggacacagtgatctttattctccgaaagaaagacgggcaggtgaccttcctacatgtcttccatcactctgtgcttccctggagctggtggtggggggtaaagattgccccgggaggaatgggctctttccatgccatgataaactcttccgtgcatgtcataatgtacctgtactacggattatctgcctttggccctgtggcacaaccctacctttggtggaaaaagcacatgacagccattcagctgatccagtttgtcctggtctcactgcacatctcccagtactactttatgtccagctgtaactaccagtacccagtcattattcacctcatctggatgtatggcaccatcttcttcatgctgttctccaacttctggtatcactcttataccaagggcaagcggctgccccgtgcacttcagcaaaatggagctccaggtattgccaaggtcaaggccaactgagaagcatggcctagataggcgcccacctaagtgcctcaggactgcaccttagggcagtgtccgtcagtgccctctccacctacacctgtgaccaaggcttatgtggtcaggactgagcaggggactggccctcccctccccacagctgctctacagggaccacggctttggttcctcacccacttcccccgggcagctccagggatgtggcctcattgctgtctgccactccagagctgggggctaaaagggctgtacagttatttccccctccctgccttaaaacttgggagaggagcactcagggctggccccacaaagggtctcgtggcctttttcctcacacagaagaggtcagcaataatgtcactgtggacccagtctcactcctccaccccacacactgaagcagtagcttctgggccaaaggtcagggtgggcgggggcctgggaatacagcctgtggaggctgcttactcaacttgtgtcttaattaaaagtgacagaggaaacc

SEQ ID NO: 29 - protein, 137 aa, Homo sapiens
MGFGATLAVGLTIFVLSVVTIIICFTCSCCCLYKTCRRPRPVVTTTTSTTVVHAPYPQPPSVPPSYPGPSYQGYHTMPPQPGMPAAPYPMQYPPPYPAQPMGPPAYHETLAGGAAAPYPASQPPYNPAYMDAPKAAL

SEQ ID NO: 30 - DNA, 1788 bp, Homo sapiens
  CDS (145)..(555)
gtgcttcctgtggctgacgtcatctggaggagatttgctttctttttctccaaaaggggaggaaattgaaactgagtggcccacgatgggaagaggggaaagcccaggggtacaggaggcctctgggtgaaggcagaggctaacatggggttcggagcgaccttggccgttggcctgaccatctttgtgctgtctgtcgtcactatcatcatctgcttcacctgctcctgctgctgcctttacaagacgtgccgccgaccacgtccggttgtcaccaccaccacatccaccactgtggtgcatgccccttatcctcagcctccaagtgtgccgcccagctaccctggaccaagctaccagggctaccacaccatgccgcctcagccagggatgccagcagcaccctacccaatgcagtacccaccaccttacccagcccagcccatgggcccaccggcctaccacgagaccctggctggaggagcagccgcgccctaccccgccagccagcctccttacaacccggcctacatggatgccccgaaggcggccctctgagcattccctggcctctctggctgccacttggttatgttgtgtgtgtgcgtgagtggtgtgcaggcgcggttccttacgccccatgtgtgctgtgtgtgtccaggcacggttccttacgccccatgtgtgctgtgtgtgtcctgcctgtatatgtggcttcctctgatgctgacaaggtggggaacaatccttgccagagtgggctgggaccagactttgttctcttcctcacctgaaattatgcttcctaaaatctcaagccaaactcaaagaatggggtggtggggggcaccctgtgaggtggcccctgagaggtgggggcctctccagggcacatctggagttcttctccagcttaccctagggtgaccaagtagggcctgtcacaccagggtggcgcagctttctgtgtgatgcagatgtgtcctggtttcggcagcgtagccagctgctgcttgaggccatggctcgtccccggagttgggggtacccgttgcagagccagggacatgatgcaggcgaagcttgggatctggccaagttggactttgatcctttgggcagatgtcccattgctccctggagcctgtcatgcctgttggggatcaggcagcctcctgatgccagaacacctcaggcagagccctactcagctgtacctgtctgcctggactgtcccctgtccccgcatctcccctgggaccagctggagggccacatgcacacacagcctagctgcccccagggagctctgctgcccttgctggccctgcccttcccacaggtgagcagggctcctgtccaccagcacactcagttctcttccctgcagtgttttcattttattttagccaaacattttgcctgttttctgtttcaaacatkatagttgatatgagactgaaacccctgggttgtggagggaaattggctcagagatggacaacctggcaactgtgagtccctgcttcccgacaccagcctcatggaatatgcaacaactcctgtaccccagtccacggtgttctggcagcagggacacctgggccaatgggccatctggaccaaaggtggggtgtggggccctggatggcagctctggcccagacatgaatacctcgtgttcctcctccctctattactgtttcaccagagctgtcttagctcaaatctgttgtgtttctgagtctagggtctgtacacttgtttataataaatgcaatcgtttgg

SEQ ID NO: 31 - protein, 118 aa, Homo sapiens
MGFGATLAVGLTIFVLSVVTIIICFTCSCCCLYKTCRRPRPVVTTTTSTTVVHAPYPQPPSVPPSYPGPSYQGYHTMPPQPGMPAAPYPMQYPPPYPAQPMGPPAYHETLAGECPCQL

SEQ ID NO: 32 - DNA, 1908 bp, Homo sapiens
  CDS (91)..(444)
gggggaggaaattgaaactgagtggcccacgatgggaagaggggaaagcccaggggtacaggaggcctctgggtgaaggcagaggctaacatggggttcggagcgaccttggccgttggcctgaccatctttgtgctgtctgtcgtcactatcatcatctgcttcacctgctcctgctgctgcctttacaagacgtgccgccgaccacgtccggttgtcaccaccaccacatccaccactgtggtgcatgccccttatcctcagcctccaagtgtgccgcccagctaccctggaccaagctaccagggctaccacaccatgccgcctcagccagggatgccagcagcaccctacccaatgcagtacccaccaccttacccagcccagcccatgggcccaccggcctaccacgagaccctggctggtgagtgcccctgccaactctagccctgcccgacttcccgagtctctgccagcatccctcgggcacccatcccaaactacatcactcaacaggcctctgcccctttctgcttgcctgccactcacacggcagcccaccatgctcacagccaaccagggtcctctctgctttcaggaggagcagccgcgccctaccccgccagccagcctccttacaacccggcctacatggatgccccgaaggcggccctctgagcattccctggcctctctggctgccacttggttatgttgtgtgtgtgcgtgagtggtgtgcaggcgcggttccttacgccccatgtgtgctgtgtgtgtccaggcacggttccttacgccccatgtgtgctgtgtgtgtcctgcctgtatatgtggcttcctctgatgctgacaaggtggggaacaatccttgccagagtgggctgggaccagactttgttctcttcctcacctgaaattatgcttcctaaaatctcaagccaaactcaaagaatggggtggtggggggcaccctgtgaggtggcccctgagaggtgggggcctctccagggcacatctggagttcttctccagcttaccctagggtgaccaagtagggcctgtcacaccagggtggcgcagctttctgtgtgatgcagatgtgtcctggtttcggcagcgtagccagctgctgcttgaggccatggctcgtccccggagttgggggtacccgttgcagagccagggacatgatgcaggcgaagcttgggatctggccaagttggactttgatcctttgggcagatgtcccattgctccctggagcctgtcatgcctgttggggatcaggcagcctcctgatgccagaacacctcaggcagagccctactcagctgtacctgtctgcctggactgtcccctgtccccgcatctcccctgggaccagctggagggccacatgcacacacagcctagctgcccccagggagctctgctgcccttgctggccctgcccttcccacaggtgagcagggctcctgtccaccagcacactcagttctcttccctgcagtgttttcattttattttagccaaacattttgcctgttttctgtttcaaacatgatagttgatatgagactgaaacccctgggttgtggagggaaattggctcagagatggacaacctggcaactgtgagtccctgcttcccgacaccagcctcatggaatatgcaacaactcctgtaccccagtccacggtgttctggcagcagggacacctgggccaatgggccatctggaccaaaggtggggtgtggggccctggatggcagctctggcccagacatgaatacctcgtgttcctcctccctctattactgtttcaccagagctgtcttagctcaaatctgttgtgtttctgagtctagggtctgtacacttgtttataataaatgcaatcgtttgg

SEQ ID NO: 33 - protein, 168 aa, Homo sapiens
MNSKGQYPTQPTYPVQPPGNPVYPQTLHLPQAPPYTDAPPAYSELYRPSFVHPGAATVPTMSAAFPGASLYLPMAQSVAVGPLGSTIPMAYYPVGPIYPPGSTVLVEGGYDAGARFGAGATAGNIPPPPPGCPPNAAQLAVMQGANVLVTQRKGNFFMGGSDGGYTIW

SEQ ID NO: 34 - DNA, 1897 bp, Homo sapiens
  CDS (70)..(573)
ctccgaacaggaagaggacgaaaaaaataaccgtccgcgacgccgagacaaaccggacccgcaaccaccatgaacagcaaaggtcaatatccaacacagccaacctaccctgtgcagcctcctgggaatccagtataccctcagaccttgcatcttcctcaggctccaccctataccgatgctccacctgcctactcagagctctatcgtccgagctttgtgcacccaggggctgccacagtccccaccatgtcagccgcatttcctggagcctctctgtatcttcccatggcccagtctgtggctgttgggcctttaggttccacaatccccatggcttattatccagtcggtcccatctatccacctggctccacagtgctggtggaaggagggtatgatgcaggtgccagatttggagctggggctactgctggcaacattcctcctccacctcctggatgccctcccaatgctgctcagcttgcagtcatgcagggagccaacgtcctcgtaactcagcggaaggggaacttcttcatgggtggttcagatggtggctacaccatctggtgaggaaccaaggccacctctgtgccgggaaagacatcacataccttcagcacttctcacaatgtaactgctttagtcatattaacctgaagttgcagtttagacacatgttgttggggtgtctttctggtgcccaaactttcaggcacttttcaaatttaataaggaaccatgtaatggtagcagtacctccctaaagcattttgaggtaggggaggtatccattcataaaatgaatgtgggtgaagccgccctaaggattttcctttaatttctctggagtaatactgtaccatactggtctttgcttttagtaataaaacatcaaattaggtttggagggaactttgatcttcctaagaattaaagttgccaaattattctgattggtctttaatctcctttaagtctttgatatatattacttgttataaatggaacgcattagttgtctgccttttcctttccatcccttgccccacccatcccatctccaaccctagtcttccatttcctcccgccagtctccattgaatcaatggtgcaggacagaaagccagtcagactaatttccttctttcctcgcacttctccccactcgtcatcttttaactagtgtttcacaaggatcctctgaaaccctctctgtgccccaagtacagatgccattacttctgctttcgtatctcctcaggcaaaagtggagggtgccttatgggccctcctcataggttgtctctgcatacacgaacctaacccaaatttgctttggtgccagaaaaactgagctatgtttgaacaaagatgtcgtgcaaactgtactgtgaacaacagttggtttaaaatatgaggggcaaggaggaggatgcatttcaaaagcttgattgatgtgttcagagctaaattaagaggagttttcagatcaaaaactggttaccattttttgtcagagtgtctgatgcggccactcattcggctccccagaattcctagactgggttaatagggtcatattgtgaatgtctcactacaaaatgacttgagtccagtgaaatctcattagggtttaagaatatttcagggatccttaatgttttgatttttgttttctgaaattggattttattttattttatcttataatttcagttcatctaaattgtgtgttctgtacatgtgatgtttgactgtaccattgactgttatggaagttcagcgttgtatgtctctctctacactgtggtgcacttaacttgtggaatttttatactaaaaatgtagaataaagactattttgaagatttgaataaagtgatgaagttgc

SEQ ID NO: 35 - protein, 455 aa, Homo sapiens
MSFLIDSSIMITSQILFFGFGWLFFMRQLFKDYEIRQYVVQVIFSVTFAFSCTMFELIIFEILGVLNSSSRYFHWKMNLCVILLILVFMVPFYIGYFIVSNIRLLHKQRLLFSCLLWLTFMYFFWKLGDPFPILSPKHGILSIEQLISRVGVIGVTLMALLSGFGAVNCPYTYMSYFLRNVTDTDILALERRLLQTMDMIISKKKRMAMARRTMFQKGEVHNKPSGFWGMIKSVTTSASGSENLTLIQQEVDALEELSRQLFLETADLYATKERIEYSKTFKGKYFNFLGYFFSIYCVWKIFMATINIVFDRVGKTDPVTRGIEITVNYLGIQFDVKFWSQHISFILVGIIIVTSIRGLLITLTKFFYAISSSKSSNVIVLLLAQIMGMYFVSSVLLIRMSMPLEYRTIITEVLGELQFNFYHRWFDVIFLVSALSSILFLYLAHKQAPEKQMAP

SEQ ID NO: 36 - DNA, 1903 bp, Homo sapiens
  CDS (116)..(1480)
agtcccggctgcagcacctgggagaaggcagaccgtgtgagggggcctgtggccccagcgtgctgtggcctcggggagtgggaagtggaggcaggagccttccttacacttcgccatgagtttcctcatcgactccagcatcatgattacctcccagatactattttttggatttgggtggcttttcttcatgcgccaattgtttaaagactatgagatacgtcagtatgttgtacaggtgatcttctccgtgacgtttgcattttcttgcaccatgtttgagctcatcatctttgaaatcttaggagtattgaatagcagctcccgttattttcactggaaaatgaacctgtgtgtaattctgctgatcctggttttcatggtgcctttttacattggctattttattgtgagcaatatccgactactgcataaacaacgactgcttttttcctgtctcttatggctgacctttatgtatttcttctggaaactaggagatccctttcccattctcagcccaaaacatgggatcttatccatagaacagctcatcagccgggttggtgtgattggagtgactctcatggctcttctttctggatttggtgctgtcaactgcccatacacttacatgtcttacttcctcaggaatgtgactgacacggatattctagccctggaacggcgactgctgcaaaccatggatatgatcataagcaaaaagaaaaggatggcaatggcacggagaacaatgttccagaagggggaagtgcataacaaaccatcaggtttctggggaatgataaaaagtgttaccacttcagcatcaggaagtgaaaatcttactcttattcaacaggaagtggatgctttggaagaattaagcaggcagctttttctggaaacagctgatctatatgctaccaaggagagaatagaatactccaaaaccttcaaggggaaatattttaattttcttggttactttttctctatttactgtgtttggaaaattttcatggctaccatcaatattgtttttgatcgagttgggaaaacggatcctgtcacaagaggcattgagatcactgtgaattatctgggaatccaatttgatgtgaagttttggtcccaacacatttccttcattcttgttggaataatcatcgtcacatccatcagaggattgctgatcactcttaccaagttcttttatgccatctctagcagtaagtcctccaatgtcattgtcctgctattagcacagataatgggcatgtactttgtctcctctgtgctgctgatccgaatgagtatgcctttagaataccgcaccataatcactgaagtccttggagaactgcagttcaacttctatcaccgttggtttgatgtgatcttcctggtcagcgctctctctagcatactcttcctctatttggctcacaaacaggcaccagagaagcaaatggcaccttgaacttaagcctactacagactgttagaggccagtggtttcaaaatttagatataagaggggggaaaaatggaaccagggcctgacattttataaacaaacaaaatgctatggtagcatttttcaccttcatagcatactccttccccgtcaggtgatactatgaccatgagtagcatcagccagaacatgagagggagaactaactcaagacaatactcagcagagagcatcccgtgtggatatgaggctggtgtagaggcggagaggagccaagaaactaaaggtgaaaaatacactggaactctggggcaagacatgtctatggtagctgagccaaacacgtaggatttccgttttaaggttcacatggaaaaggttatagctttgccttgagattgactcattaaaatcagagactgt

SEQ ID NO: 37 - protein, 322 aa, Homo sapiens
MSSLGGGSQDAGGSSSSSTNGSGGSGSSGPKAGAADKSAVVAAAAPASVADDTPPPERRNKSGIISEPLNKSLRRSRPLSHYSSFGSSGGSGGGSMMGGESADKATAAAAAASLLANGHDLAAAMAVDKSNPTSKHKSGAVASLLSKAERATELAAEGQLTLQQFAQSTEMLKRVVQEHLPLMSEAGAGLPDMEAVAGAEALNGQSDFPYLGAFPINPGLFIMTPAGVFLAESALHMAGLAEYPMQGELASAISSGKKKRKRCGMCAPCRRRINCEQCSSCRNRKTGHQICKFRKCEELKKKPSAALEKVMLPTGAAFRWFQ

SEQ ID NO: 38 - DNA, 1448 bp, Homo sapiens
  CDS (292)..(1257)
tactgctggcggctggagcggagcgcaccgcggcggtggtgcccagagcggagcgcagctccctgccccgcccctccccctcggcctcgcggcgacggcggcggtggcggcttggacgactcggagagccgagtgaagacatttccacctggacacctgaccatgtgcctgccctgagcagcgaggcccaccaggcatctctgttgtgggcagcagggccaggtcctggtctgtggaccctcggcagttggcaggctccctctgcagtggggtctgggcctcggccccaccatgtcgagcctcggcggtggctcccaggatgccggcggcagtagcagcagcagcaccaatggcagcggtggcagtggcagcagtggcccaaaggcaggagcagcagacaagagtgcagtggtggctgccgccgcaccagcctcagtggcagatgacacaccaccccccgagcgtcggaacaagagcggtatcatcagtgagcccctcaacaagagcctgcgccgctcccgcccgctctcccactactcttcttttggcagcagtggtggtagtggcggtggcagcatgatgggcggagagtctgctgacaaggccactgcggctgcagccgctgcctccctgttggccaatgggcatgacctggcggcggccatggcggtggacaaaagcaaccctacctcaaagcacaaaagtggtgctgtggccagcctgctgagcaaggcagagcgggccacggagctggcagccgagggacagctgacgctgcagcagtttgcgcagtccacagagatgctgaagcgcgtggtgcaggagcatctcccgctgatgagcgaggcgggtgctggcctgcctgacatggaggctgtggcaggtgccgaagccctcaatggccagtccgacttcccctacctgggcgctttccccatcaacccaggcctcttcattatgaccccggcaggtgtgttcctggccgagagcgcgctgcacatggcgggcctggctgagtaccccatgcagggagagctggcctctgccatcagctccggcaagaagaagcggaaacgctgcggcatgtgcgcgccctgccggcggcgcatcaactgcgagcagtgcagcagttgtaggaatcgaaagactggccatcagatttgcaaattcagaaaatgtgaggaactcaaaaagaagccttccgctgctctggagaaggtgatgcttccgacgggagccgccttccggtggtttcagtgacggcggcggaacccaaagctgccctctccgtgcaatgtcactgctcgtgtggtctccagcaagggattcgggcgaagacaaacggatgcacccgtctttagaaccaaaaatattctctcacagatttcattcctgtttttatatatatattttttgttgtcgttttaacatctccacgtccctagcat

SEQ ID NO: 39 - protein, 313 aa, Homo sapiens
MAGQPGHMPHGGSSNNLCHTLGPVHPPDPQRHPNTLSFRCSLADFQIEKKIGRGQFSEVYKATCLLDRKTVALKKVQIFEMMDAKARQDCVKEIGLLKQLNHPNIIKYLDSFIEDNELNIVLELADAGDLSQMIKYFKKQKRLIPERTVWKYFVQLCSAVEHMHSRRVMHRDIKPANVFITATGVVKLGDLGLGRFFSSETTAAHSLVGTPYYMSPERIHENGYNFKSDIWSLGCLLYEMAALQSPFYGDKMNLFSLCQKIEQCDYPPLPGEHYSEKLRELVSMCICPDPHQRPDIGYVHQVAKQMHIWMSST

SEQ ID NO: 40 - DNA, 1597 bp, Homo sapiens
  CDS (153)..(1091)
ggcggaaccgagctgacgggcgtgcggccgctgcgccgcaaactcgtgtgggacgcaccgctccagccgcccgcgggccagcgcaccggtcccccagcggcagccgagcccgcccgcgcgccgttcgtgccctcgtgaggctggcatgcaggatggcaggacagcccggccacatgccccatggagggagttccaacaacctctgccacaccctggggcctgtgcatcctcctgacccacagaggcatcccaacacgctgtcttttcgctgctcgctggcggacttccagatcgaaaagaagataggccgaggacagttcagcgaggtgtacaaggccacctgcctgctggacaggaagacagtggctctgaagaaggtgcagatctttgagatgatggacgccaaggcgaggcaggactgtgtcaaggagatcggcctcttgaagcaactgaaccacccaaatatcatcaagtatttggactcgtttatcgaagacaacgagctgaacattgtgctggagttggctgacgcaggggacctctcgcagatgatcaagtactttaagaagcagaagcggctcatcccggagaggacagtatggaagtactttgtgcagctgtgcagcgccgtggagcacatgcattcacgccgggtgatgcaccgagacatcaagcctgccaacgtgttcatcacagccacgggcgtcgtgaagctcggtgaccttggtctgggccgcttcttcagctctgagaccaccgcagcccactccctagtggggacgccctactacatgtcaccggagaggatccatgagaacggctacaacttcaagtccgacatctggtccttgggctgtctgctgtacgagatggcagccctccagagccccttctatggagataagatgaatctcttctccctgtgccagaagatcgagcagtgtgactaccccccactccccggggagcactactccgagaagttacgagaactggtcagcatgtgcatctgccctgacccccaccagagacctgacatcggatacgtgcaccaggtggccaagcagatgcacatctggatgtccagcacctgagcgtggatgcaccgtgccttatcaaagccagcaccactttgccttacttgagtcgtcttctcttcgagtggccacctggtagcctagaacagctaagaccacagggttcagcaggttccccaaaaggctgcccagccttacagcagatgctgaaggcagagcagctgagggaggggcgctggccacatgtcactgatggtcagattccaaagtcctttctttatactgttgtggacaatctcagctgggtcaataagggcaggtggttcagcgagccacggcagccccctgtatctggattgtaatgtgaatctttagggtaattcctccagtgacctgtcaaggcttatgctaacaggagacttgcaggagaccgtgtgatttgtgtagtgagcctttgaaaatggttagtaccgggttcagtttagttcttggtatcttttcaatcaagctgtgtgcttaatttactctgttgtaaagggataaagtggaaatcatttttt

SEQ ID NO: 41 - protein, 371 aa, Homo sapiens
MSHEKSFLVSGDNYPPPNPGYPGGPQPPMPPYAQPPYPGAPYPQPPFQPSPYGQPGYPHGPSPYPQGGYPQGPYPQGGYPQGPYPQEGYPQGPYPQGGYPQGPYPQSPFPPNPYGQPQVFPGQDPDSPQHGNYQEEGPPSYYDNQDFPATNWDDKSIRQAFIRKVFLVLTLQLSVTLSTVSVFTFVAEVKGFVRENVWTYYVSYAVFFISLIVLSCCGDFRRKHPWNLVALSVLTASLSYMVGMIASFYNTEAVIMAVGITTAVCFTVVIFSMQTRYDFTSCMGVLLVSMVVLFIFAILCIFIRNRILEIVYASLGALLFTCFLAVDTQLLLGNKQLSLSPEEYVFAALNLYTDIINIFLYILTIIGRAKE

SEQ ID NO: 42 - DNA, 1781 bp, Homo sapiens
  CDS (91)..(1203)
attggccatcaccgcgcggccgcgcagcggacaccgtgcgtaccggcctgcggcgcccggccaccggggcggaccgcggaacccgaggccatgtcccatgaaaagagttttttggtgtctggggacaactatcctccccccaaccctggatatccgggggggccccagccacccatgcccccctatgctcagcctccctaccctggggccccttacccacagccccctttccagccctccccctacggtcagccagggtacccccatggccccagcccctacccccaagggggctacccacagggtccctacccccaagggggctacccacagggcccctacccacaagagggctacccacagggcccctacccccaagggggctacccccaggggccatatccccagagccccttcccccccaacccctatggacagccacaggtcttcccaggacaagaccctgactcaccccagcatggaaactaccaggaggagggtcccccatcctactatgacaaccaggacttccctgccaccaactgggatgacaagagcatccgacaggccttcatccgcaaggtgttcctagtgctgaccttgcagctgtcggtgaccctgtccacggtgtctgtgttcacttttgttgcggaggtgaagggctttgtccgggagaatgtctggacctactatgtctcctatgctgtcttcttcatctctctcatcgtcctcagctgttgtggggacttccggcgaaagcacccctggaaccttgttgcactgtcggtcctgaccgccagcctgtcgtacatggtggggatgatcgccagcttctacaacaccgaggcagtcatcatggccgtgggcatcaccacagccgtctgcttcaccgtcgtcatcttctccatgcagacccgctacgacttcacctcatgcatgggcgtgctcctggtgagcatggtggtgctcttcatcttcgccattctctgcatcttcatccggaaccgcatcctggagatcgtgtacgcctcactgggcgctctgctcttcacctgcttcctcgcagtggacacccagctgctgctggggaacaagcagctgtccctgagcccagaagagtatgtgtttgctgcgctgaacctgtacacagacatcatcaacatcttcctgtacatcctcaccatcattggccgcgccaaggagtagccgagctccagctcgctgtgcccgctcaggtggcacggctggcctggaccctgcccctggcacggcagtgccagctgtacttcccctctctcttgtccccaggcacagcctagggaaaaggatgcctctctccaaccctcctgtatgtacactgcagatacttccatttggacccgctgtggccacagcatggcccctttagtcctcccgcccccgccaaggggcagcaaggccacgtttccgtgccacctcctgtctactcattgttgcatgagccctgtctgccagcccaccccagggactgggggcagcaccaggtcccggggagagggattgagccaagaggtgagggtgcacgtcttccctcctgtcccagctccccagcctggcgtagagcacccctcccctcccccccacccccctggagtgctgccctctggggacatgcggagtgggggtcttatccctgtgctgagccctgagggcagagaggatggcatgtttcaggggagggggaagccttcctctcaatttgttgtcagtgaaattccaataaatgggatttgctctctgcc

SEQ ID NO: 43 - protein, 393 aa, Homo sapiens
MSDEREVAEAATGEDASSPPPKTEAASDPQHPAASEGAAAAAASPPLLRCLVLTGFGGYDKVKLQSRPAAPPAPGPGQLTLRLRACGLNFADLMARQGLYDRLPPLPVTPGMEGAGVVIAVGEGVSDRKAGDRVMVLNRSGMWQEEVTVPSVQTFLIPEAMTFEEAAALLVNYITAYMVLFDFGNLQPGHSVLVHMAAGGVGMAAVQLCRTVENVTVFGTASASKHEALKENGVTHPIDYHTTDYVDEIKKISPKGVDIVMDPLGGSDTAKGYNLLKPMGKVVTYGMANLLTGPKRNLMALARTWWNQFSVTALQLLQANRAVCGFHLGYLDGEVELVSGVVARLLALYNQGHIKPHIDSVWPFEKVADAMKQMQEKKNVGKVLLVPGPEKEN

SEQ ID NO: 44 - DNA, 2396 bp, Homo sapiens
  CDS (50)..(1228)
agctgtgcactctccatccagctgtgcgctctcgtcgggagtcccagccatgtccgacgagagagaggtagccgaggcagcgaccggggaagacgcctcttcgccgcctccgaaaaccgaggcagcgagcgacccccagcatcccgcggcctccgaaggggccgccgccgccgccgcctcgccgccactgctgcgctgcctagtgctcaccggctttggaggctacgacaaggtgaagctgcagagccggccggcagcgcccccggcccctgggcccggccagctgacgctgcgtctgcgggcctgcgggctcaacttcgcagacctcatggctaggcaggggctgtacgaccgtctcccgcctctgcctgtcactccgggcatggagggcgcgggtgttgtgatcgcagtgggcgagggagtcagcgaccgcaaggcaggagaccgggtgatggtgttgaaccggtcagggatgtggcaggaagaggtgactgtgccctcggtccagaccttcctgattcctgaggccatgacctttgaggaagctgctgccttgctcgtcaattacattacagcctacatggtcctctttgacttcggcaacctacagcctggccacagcgtcttggtacacatggctgcagggggtgtgggtatggctgccgtgcagctgtgccgtacagtggagaatgtgacagtgttcggaacggcctcggccagcaagcacgaggcactgaaggagaatggggtcacacatcccatcgactatcacacgactgactacgtggatgagatcaagaagatttcccctaaaggagtggacattgtcatggaccctctgggtgggtcagatactgccaagggctacaacctcctgaaacccatgggcaaagtcgtcacctatggaatggccaacctgctgacgggccccaaacggaacctgatggccctggcccggacatggtggaatcagttcagcgtgacagctctgcagctgctgcaggccaaccgggctgtgtgtggcttccacctgggctacctggatggtgaggtggagctggtcagtggtgtggtggcccgcctcctggctctgtacaaccagggccacatcaagccccacattgactcagtctggcccttcgagaaggtggctgatgccatgaaacagatgcaggagaagaagaatgtgggcaaggtcctcctggttccagggccagagaaggagaactagggcaagtggctgtgagaccctagagaccagcgaagggagaagttgggaagctacgttctgttggccaccagacttgcatttcagcctctgtcataatgctctgccctccctcccccgaagttctctgtggtgatgaccgctctcccctgcccctccccgcttcctgacctctgaagaggttgggaagtgaccatttggatgtctgggccctgccaaggcgacagggagggtcagagggaggccggctgcttcctgcccccaccctttccccgggcctgctgtgctgcttttgtgccaaggttagccagtcccccctgttgtgttccatgtgctttcacctctgcctcatctttcctcccgtccctgccccgccacctccccaaagaattgaaacgtcagctcaggatatggggccaatctctgtgagtccagcatgtacctgtctctccctagtgtcccttcagcctgggctgaccagtgcccgcctctgggcttgaccagttcccaatctcgtcctctgtccccaacttcttaagcacaattgggcttcttccatctccaggttttctgccattcttaaccaaggcagccccaagcctcctggggaggcagggcaaaaacaggtgccctcatcgtggtctgtgccatgtcccgtctctatggtggttgaggagaaaggcggggaagcttcctcagccttgcagatatgtgtggcatttactagccagagctctgaaaggcagtgctgtctgtttcttgtactgggaccaaagtaaaaatccaagcacattccccttgcagttaggggaggccctactgccttctcaaagcagagaggcagcttatcaaactcagcccaaaactctgtttacatgggtggggagatggagcagggaagtacagagtgggatggtcaggacctgggccattgcaaccaaaatggggacttcctgggtagggaggtcactccctctactcactgagctaggattagggagggttattgccccaaccattgcaatgggaggtggagggacaggctcagcctcctcattgtctaaatgaggcctaaatgtgtgaagtgcgatttctgcttttgtgtaccccaccaccccattaccacagctgcctttgtgtgtttgtgtcaataaaaagccaaaccctg

SEQ ID NO: 45 - protein, 393 aa, Homo sapiens
MSDEREVAEAATGEDASSPPPKTEAASDPQHPAASEGAAAAAASPPLLRCLVLTGFGGYDKVKLQSRPAAPPAPGPGQLTLRLRACGLNFADLMARQGLYDRLPPLPVTPGMEGAGVVIAVGEGVSDRKAGDRVMVLNRSGMWQEEVTVPSVQTFLIPEAMTFEEAAALLVNYITAYMVLFDFGNLQPGHSVLVHMAAGGVGMAAVQLCRTVENVTVFGTASASKHEALKENGVTHPIDYHTTDYVDEIKKISPKGVDIVMDPLGGSDTAKGYNLLKPMGKVVTYGMANLLTGPKRNLMALARTWWNQFSVTALQLLQANRAVCGFHLGYLDGEVELVSGVVARLLALYNQGHIKPHIDSVWPFEKVADAMKQMQEKKNVGKVLLVPGPEKQN

SEQ ID NO: 46 - DNA, 2396 bp, Homo sapiens
  CDS (50)..(1228)
agctgtgcactctccatccagctgtgcgctctcgtcgggagtcccagccatgtccgacgagagagaggtagccgaggcagcgaccggggaagacgcctcttcgccgcctccgaaaaccgaggcagcgagcgacccccagcatcccgcggcctccgaaggggccgccgccgccgccgcctcgccgccactgctgcgctgcctagtgctcaccggctttggaggctacgacaaggtgaagctgcagagccggccggcagcgcccccggcccctgggcccggccagctgacgctgcgtctgcgggcctgcgggctcaacttcgcagacctcatggctaggcaggggctgtacgaccgtctcccgcctctgcctgtcactccgggcatggagggcgcgggtgttgtgatcgcagtgggcgagggagtcagcgaccgcaaggcaggagaccgggtgatggtgttgaaccggtcagggatgtggcaggaagaggtgactgtgccctcggtccagaccttcctgattcctgaggccatgacctttgaggaagctgctgccttgctcgtcaattacattacagcctacatggtcctctttgacttcggcaacctacagcctggccacagcgtcttggtacacatggctgcagggggtgtgggtatggctgccgtgcagctgtgccgtacagtggagaatgtgacagtgttcggaacggcctcggccagcaagcacgaggcactgaaggagaatggggtcacacatcccatcgactatcacacgactgactacgtggatgagatcaagaagatttcccctaaaggagtggacattgtcatggaccctctgggtgggtcagatactgccaagggctacaacctcctgaaacccatgggcaaagtcgtcacctatggaatggccaacctgctgacgggccccaaacggaacctgatggccctggcccggacatggtggaatcagttcagcgtgacagctctgcagctgctgcaggccaaccgggctgtgtgtggcttccacctgggctacctggatggtgaggtggagctggtcagtggtgtggtggcccgcctcctggctctgtacaaccagggccacatcaagccccacattgactcagtctggcccttcgagaaggtggctgatgccatgaaacagatgcaggagaagaagaatgtgggcaaggtcctcctggttccagggccagagaagcagaactagggcaagtggctgtgagaccctagagaccagcgaagggagaagttgggaagctacgttctgttggccaccagacttgcatttcagcctctgtcataatgctctgccctccctcccccgaagttctctgtggtgatgaccgctctcccctgcccctccccgcttcctgacctctgaagaggttgggaagtgaccatttggatgtctgggccctgccaaggcgacagggagggtcagagggaggccggctgcttcctgcccccaccctttccccgggcctgctgtgctgcttttgtgccaaggttagccagtcccccctgttgtgttccatgtgctttcacctctgcctcatctttcctcccgtccctgccccgccacctccccaaagaattgaaacgtcagctcaggatatggggccaatctctgtgagtccagcatgtacctgtctctccctagtgtcccttcagcctgggctgaccagtgcccgcctctgggcttgaccagttcccaatctcgtcctctgtccccaacttcttaagcacaattgggcttcttccatctccaggttttctgccattcttaaccaaggcagccccaagcctcctggggaggcagggcaaaaacaggtgccctcatcgtggtctgtgccatgtcccgtctctatggtggttgaggagaaaggcggggaagcttcctcagccttgcagatatgtgtggcatttactagccagagctctgaaaggcagtgctgtctgtttcttgtactgggaccaaagtaaaaatccaagcacattccccttgcagttaggggaggccctactgccttctcaaagcagagaggcagcttatcaaactcagcccaaaactctgtttacatgggtggggagatggagcagggaagtacagagtgggatggtcaggacctgggccattgcaaccaaaatggggacttcctgggtagggaggtcactccctctactcactgagctaggattagggagggttattgccccaaccattgcaatgggaggtggagggacaggctcagcctcctcattgtctaaatgaggcctaaatgtgtgaagtgcgatttctgcttttgtgtaccccaccaccccattaccacagctgcctttgtgtgtttgtgtcaataaaaagccaaaccctg

SEQ ID NO: 47 - protein, 138 aa, Homo sapiens
MISLTDTQKIGMGLTGFGVFFLFFGMILFFDKALLAIGNVLFVAGLAFVIGLERTFRFFFQKHKMKATGFFLGGVFVVLIGWPLIGMIFEIYGFFLLFRGFFPVVVGFIRRVPVLGSLLNLPGIRSFVDKVGESNNMV

SEQ ID NO: 48 - DNA, 2976 bp, Homo sapiens
  CDS (110)..(523)
agacgtggcggctctcgcctgggctgtttcccggcttcatttctcccgactcagcttcccaccctgggctttccgaggtgctgtcgccgctgtccccaccactgcagccatgatctccttaacggacacgcagaaaattggaatgggattaacaggatttggagtgtttttcctgttctttggaatgattctcttttttgacaaagcactactggctattggaaatgttttatttgtagccggcttggcttttgtaattggtttagaaagaacattcagattcttcttccaaaaacataaaatgaaagctacaggtttttttctgggtggtgtatttgtagtccttattggttggcctttgataggcatgatcttcgaaatttatggattttttctcttgttcaggggcttctttcctgtcgttgttggctttattagaagagtgccagtccttggatccctcctaaatttacctggaattagatcatttgtagataaagttggagaaagcaacaatatggtataacaacaagtgaatttgaagactcatttaaaatattgtgttatttataaagtcatttgaagaatattcagcacaaaattaaattacatgaaatagcttgtaatgttctttacaggagtttaaaacgtatagcctacaaagtaccagcagcaaattagcaaagaagcagtgaaaacaggcttctactcaagtgaactaagaagaagtcagcaagcaaactgagagaggtgaaatccatgttaatgatgcttaagaaactcttgaaggctatttgtgttgtttttccacaatgtgcgaaactcagccatccttagagaactgtggtgcctgtttcttttctttttattttgaaggctcaggagcatccataggcatttgctttttagaaatgtccactgcaatggcaaaaatatttccagttgcactgtatctctggaagtgatgcatgaattcgattggattgtgtcattttaaagtattaaaaccaaggaaaccccaattttgatgtatggattacttttttttgtaaacatggttaaaataaaacttctgtggttcttctgaatcttaatatttcaaagccaggtgaaaatctgaactagatattctttgttggaatatgcaaaggtcattctttactaacttttagttactaaattatagctaagttttgtcagcagcatactccggaaagtctcatacttcttgggagtctgccctcctaagtatctgtctatatcattcattacgtgtaagtatttaacaaaaaagcattcttgaccatgaatgaagtagtttgtttcatagcttgtctcattgaatagtattattgaagatactaaatgatgcaaaccaaatggattttttccatgtcatgatgtaatttttctttcttctttcttttttttaaattttagcagtggcttattatttgtttttcataaattaaaataacttttgataatgtttactttaagacatgtaacatgttaaaaggttaaacttatggctgtttttaaagggctattcatttaatctgagttttcccttattttcagctttttcctagcatataatagtcattaagcatgacatatccttcatatgatcactcatcttgagttaattagaaaatacctgagttcacgtgctaaagtcatttcactgtaataaactgactatggtttcttaagaacatgacactaaaaaaaaagtggtttttttccaccgttgctgattattagacagtaggaaatagctgttttctttagttttacaagatgtgacagctttagtggtagatgtagggaaacatttcaacagccatagtactatttgttttaccactgattgcactgttttgtttttttaacagttgcaaagctttttaatgcataaaagtataattgaaatctgtggtatttatttacaaacatgtctacaaaaatagattacagcttattttatttttagttaaatctcttaatacacagagaactcccaatcttgctcatctaaataaggaaagacttggtgtatagtgtgatggtttagtcttaaggattaagacatttttggtacttgcatttgacttacgatgtatctgtgaaaatgggatgatattgacaaatggagactcctacctcaatagttaatggaataataagaggctactgttgtgtctaatgttcttcaaaaaagtaatatcctcacttggagagtgtcaaatacatactttgaggattgactttatataaggtgccctgtagaactctgttacacatatttttgacccatattatttacaatgtcttgataattctacctttttagagcaagaatagtatctgctaatgtaagggacatctgtatttaactcctttgtagacatgaatttctatcaaaatgttctttgcactgtaacagagattccttttttcaataatcttaattcaaaagcattattagacttgaaagggtttgataatctcccagtccttagtaaagattgagagaggctggagcagttttcagttttaaatgagtctgcagttaatatcaaatgtgagtttgggactgcctggcaacatttatatttcttattcagaacccttgatgagactatttttaaacatactagtctgctgatagaaagcactatacatcctattgtttctttctttccaaaatcagccttctgtctgtaacaaaaatgtactttatagagatggaggaaaaggtctaatactacatagccttaagtgtttctgtcattgttcaagtgtattttctgtaacagaaacatatttggaatgtttttcttttccccttataaattgtaattcctgaaatactgctgctttaaaaagtcccactgtcagattatattatctaacaattgaatattgtaaatatacttgtcttacctctcaataaaagggtacttttctatt

SEQ ID NO: 49 - protein, 359 aa, Homo sapiens
MSKETIIKCEKQKPRFHAFLKINQAKPECGRQSLVELLIRPVQRLPSVALLLNDLKKHTADENPDKSTLEKAIGSLKEVMTHINEDKRKTEAQKQIFDVVYEVDGCPANLLSSHRSLVQRVETISLGEHPCDRGEQVTLFLFNDCLEIARKRHKVIGTFRSPHGQTRPPASLKHIHLMPLSQIKKVLDIRETEDCHNAFALLVRPPTEQANVLLSFQMTSDELPKENWLKMLCRHVANTICKADAENLIYTADPESFEVNTKDMDSTLSRASRAIKKTSKKVTRAFSFSKTPKRALRRALMTSHGSVEGRSPSSNDKHVMSRLSSTSSLAGIPSPSLVSLPSFFERRSHTLSRSTTHLI

SEQ ID NO: 50 - DNA, 2636 bp, Homo sapiens
  CDS (327)..(1403)
cttcaaagcagtcagcaaggtggcaagttgcaaaagagctttatcaaactgaaagtaattatgttaatatattggcaacaattattcagttatttcaagtaccattggaagaggaaggacaacgtggtggacctatccttgcaccagaggagattaagactatttttggtagcatcccagatatctttgatgtacacactaagataaaggatgatcttgaagaccttatagttaattgggatgagagcaaaagcattggtgacatttttctgaaatattcaaaagatttggtaaaaacctaccctccctttgtaaacttctttgaaatgagcaaggaaacaattattaaatgtgaaaaacagaaaccaagatttcatgcttttctcaagataaaccaagcaaaaccagaatgtggacggcagagccttgttgaacttcttatccgaccagtacagaggttacccagtgttgcattacttttaaatgatcttaagaagcatacagctgatgaaaatccagacaaaagcactttagaaaaagctattggatcactgaaggaagtaatgacgcatattaatgaggataagagaaaaacagaagctcaaaagcaaatttttgatgttgtttatgaagtagatggatgcccagctaatcttttatcttctcaccgaagcttagtacagcgggttgaaacaatttctctaggtgagcacccctgtgacagaggagaacaagtaactctcttcctcttcaatgattgcctagagatagcaagaaaacggcacaaggttattggcacttttaggagtcctcatggccaaacccgacccccagcttctcttaagcatattcacctaatgcctctttctcagattaagaaggtattggacataagagagacagaagattgccataatgcttttgccttgcttgtgaggccaccaacagagcaggcaaatgtgctactcagtttccagatgacatcagatgaacttccaaaagaaaactggctaaagatgctgtgtcgacatgtagctaacaccatttgtaaagcagatgctgagaatcttatttatactgctgatccagaatcctttgaagtaaatacaaaagatatggacagtacattgagtagagcatcaagagcaataaaaaagacttcaaaaaaggttacaagagcattctctttctccaaaactccaaaaagagctcttcgaagggctcttatgacatcccacggctcagtggagggaagaagtccttccagcaatgataagcatgtaatgagtcgtctttctagcacatcatcattagcaggtatcccttctccctcccttgtcagccttccttccttctttgaaaggagaagtcatacgttaagtagatctacaactcatttgatatgaagcgttaccaaaatcttaaattatagaaatgtatagacacctcatactcaaataagaaactgacttaaatggtacttgtaattagcacttggtgaaagctggaaggaagataaataacactaaactatgctatttgatttttcttcttgaaagagtaaggtttacctgttacattttcaagttaattcatgtaaaaaatgatagtgattttgatgtaatttatctcttgtttgaatctgtcattcaaaggccaataatttaagttgctatcagctgatattagtagctttgcaaccctgatagagtaaataaattttatgggcgggtgccaaatactgctgtgaatctatttgtatagtatccatgaatgaatttatggaaatagatatttgtgcagctcaatttatgcagagattaaatgacatcataatactggatgaaaacttgcatagaattctgattaaatagtgggtctgtttcacatgtgcagtttgaagtatttaaataaccactcctttcacagtttattttcttctcaagcgttttcaagatctagcatgtggattttaaaagatttgccctcattaacaagaataacatttaaaggagattgtttcaaaatatttttgcaaattgagataaggacagaaagattgagaaacattgtatattttgcaaaaacaagatgtttgtagctgtttcagagagagtacggtatatttatggtaattttatccactagcaaatcttgatttagtttgatagtgtgtggaattttattttgaaggataagaccatgggaaaattgtggtaaagactgtttgtacccttcatgaaataattctgaagttgccatcagttttactaatcttctgtgaaatgcatagatatgcgcatgttcaactttttattgtggtcttataattaaatgtaaaattgaaaattcatttgctgtttcaaagtgtgatatctttcacaatagcctttttatagtcagtaattcagaataatcaagttcatatggataaatgcatttttatttcctatttctttagggagtgctacaaatgtttgtcacttaaatttcaagtttctgttttaatagttaactgactatagattgttttctatgccatgtatgtgccacttctgagagtagtaaatgactctttgctacattttaaaagcaattgtattagtaagaactttgtaaataaatacctaaaaccc

SEQ ID NO: 51 - protein, 883 aa, Homo sapiens
MAENSVLTSTTGRTSLADSSIFDSKVTEISKENLLIGSTSYVEEEMPQIETRVILVQEAGKQEELTKALKDIKVGFVKMESVEEFEGLDSPEFENVFVVTDFQDSVFNDLYKADCRVIGPPVVLNCSQKGEPLPFSCRPLYCTSMMNLVLCFTGFRKKEELVRLVTLVHHMGGVIRKDFNSKVTHLVANCTQGEKFRVAVSLGTPIMKPEWIYKAWERRNEQDFYAAVDDFRNEFKVPPFQDCIFSFLGFSDEEKTNMEEMTEMQGGKYLPLGDERCTHLVVEENIVKDLPFEPSKKLYVVKQEWFWGSIQMDARAGETMYLYEKANTPELKKSVSMLSLNTPNSNRKRRRLKETLAQLSRDTDVSPFPPRKRPSAEHSLSIGSLLDISNTPESSINYGDTPKSCTKSSKSSTPVPSKQSARWQVAKELYQTESNYVNILATIIQLFQVPLEEEGQRGGPILAPEEIKTIFGSIPDIFDVHTKIKDDLEDLIVNWDESKSIGDIFLKYSKDLVKTYPPFVNFFEMSKETIIKCEKQKPRFHAFLKINQAKPECGRQSLVELLIRPVQRLPSVALLLNDLKKHTADENPDKSTLEKAIGSLKEVMTHINEDKRKTEAQKQIFDVVYEVDGCPANLLSSHRSLVQRVETISLGEHPCDRGEQVTLFLFNDCLEIARKRHKVIGTFRSPHGQTRPPASLKHIHLMPLSQIKKVLDIRETEDCHNAFALLVRPPTEQANVLLSFQMTSDELPKENWLKMLCRHVANTICKADAENLIYTADPESFEVNTKDMDSTLSRASRAIKKTSKKVTRAFSFSKTPKRALRRALMTSHGSVEGRSPSSNDKHVMSRLSSTSSLAGIPSPSLVSLPSFFERRSHTLSRSTTHLI

SEQ ID NO: 52 - DNA, 3910 bp, Homo sapiens
  CDS (29)..(2677)
agagtgctgatttagaagaatacaaatcatggctgaaaatagtgtattaacatccactactgggaggactagcttggcagactcttccatttttgattctaaagttactgagatttccaaggaaaacttacttattggatctacttcatatgtagaagaagagatgcctcagattgaaacaagagtgatattggttcaagaagctggaaaacaagaagaacttacaaaagccttaaaggacattaaagtgggctttgtaaagatggagtcagtggaagaatttgaaggtttggattctccggaatttgaaaatgtatttgtagtcacggactttcaggattctgtctttaatgacctctacaaggctgattgtagagttattggaccaccagttgtattaaattgttcacaaaaaggagagcctttgccattttcatgtcgcccgttgtattgtacaagtatgatgaatctagtactatgctttactggatttaggaaaaaagaagaactagtcaggttggtgacattggtccatcacatgggtggagttattcgaaaagactttaattcaaaagttacacatttggtggcaaattgtacacaaggagaaaaattcagggttgctgtgagtctaggtactccaattatgaagccagaatggatttataaagcttgggaaaggcggaatgaacaggatttctatgcagcagttgatgactttagaaatgaatttaaagttcctccatttcaagattgtatttttagtttcctgggattttcagatgaagagaaaaccaatatggaagaaatgactgaaatgcaaggaggtaaatatttaccgcttggagatgaaagatgcactcaccttgtagttgaagagaatatagtaaaagatcttccctttgaaccttcaaagaaactttatgttgtcaagcaagagtggttctggggaagcattcaaatggatgcccgagctggagaaactatgtatttatatgaaaaggcaaatactcctgagctcaagaaatcagtgtcaatgctttctctaaatacccctaacagcaatcgcaaacgacgtcgtttaaaagaaacacttgctcagctttcaagagatacagacgtgtcaccatttccaccccgtaagcgcccatcagctgagcattccctttccatagggtcactcctagatatctccaacacaccagagtctagcattaactatggagacaccccaaagtcttgtactaagtcttctaaaagctccactccagttccttcaaagcagtcagcaaggtggcaagttgcaaaagagctttatcaaactgaaagtaattatgttaatatattggcaacaattattcagttatttcaagtaccattggaagaggaaggacaacgtggtggacctatccttgcaccagaggagattaagactatttttggtagcatcccagatatctttgatgtacacactaagataaaggatgatcttgaagaccttatagttaattgggatgagagcaaaagcattggtgacatttttctgaaatattcaaaagatttggtaaaaacctaccctccctttgtaaacttctttgaaatgagcaaggaaacaattattaaatgtgaaaaacagaaaccaagatttcatgcttttctcaagataaaccaagcaaaaccagaatgtggacggcagagccttgttgaacttcttatccgaccagtacagaggttacccagtgttgcattacttttaaatgatcttaagaagcatacagctgatgaaaatccagacaaaagcactttagaaaaagctattggatcactgaaggaagtaatgacgcatattaatgaggataagagaaaaacagaagctcaaaagcaaatttttgatgttgtttatgaagtagatggatgcccagctaatcttttatcttctcaccgaagcttagtacagcgggttgaaacaatttctctaggtgagcacccctgtgacagaggagaacaagtaactctcttcctcttcaatgattgcctagagatagcaagaaaacggcacaaggttattggcacttttaggagtcctcatggccaaacccgacccccagcttctcttaagcatattcacctaatgcctctttctcagattaagaaggtattggacataagagagacagaagattgccataatgcttttgccttgcttgtgaggccaccaacagagcaggcaaatgtgctactcagtttccagatgacatcagatgaacttccaaaagaaaactggctaaagatgctgtgtcgacatgtagctaacaccatttgtaaagcagatgctgagaatcttatttatactgctgatccagaatcctttgaagtaaatacaaaagatatggacagtacattgagtagagcatcaagagcaataaaaaagacttcaaaaaaggttacaagagcattctctttctccaaaactccaaaaagagctcttcgaagggctcttatgacatcccacggctcagtggagggaagaagtccttccagcaatgataagcatgtaatgagtcgtctttctagcacatcatcattagcaggtatcccttctccctcccttgtcagccttccttccttctttgaaaggagaagtcatacgttaagtagatctacaactcatttgatatgaagcgttaccaaaatcttaaattatagaaatgtatagacacctcatactcaaataagaaactgacttaaatggtacttgtaattagcacttggtgaaagctggaaggaagataaataacactaaactatgctatttgatttttcttcttgaaagagtaaggtttacctgttacattttcaagttaattcatgtaaaaaatgatagtgattttgatgtaatttatctcttgtttgaatctgtcattcaaaggccaataatttaagttgctatcagctgatattagtagctttgcaaccctgatagagtaaataaattttatgggcgggtgccaaatactgctgtgaatctatttgtatagtatccatgaatgaatttatggaaatagatatttgtgcagctcaatttatgcagagattaaatgacatcataatactggatgaaaacttgcatagaattctgattaaatagtgggtctgtttcacatgtgcagtttgaagtatttaaataaccactcctttcacagtttattttcttctcaagcgttttcaagatctagcatgtggattttaaaagatttgccctcattaacaagaataacatttaaaggagattgtttcaaaatatttttgcaaattgagataaggacagaaagattgagaaacattgtatattttgcaaaaacaagatgtttgtagctgtttcagagagagtacggtatatttatggtaattttatccactagcaaatcttgatttagtttgatagtgtgtggaattttattttgaaggataagaccatgggaaaattgtggtaaagactgtttgtacccttcatgaaataattctgaagttgccatcagttttactaatcttctgtgaaatgcatagatatgcgcatgttcaactttttattgtggtcttataattaaatgtaaaattgaaaattcatttgctgtttcaaagtgtgatatctttcacaatagcctttttatagtcagtaattcagaataatcaagttcatatggataaatgcatttttatttcctatttctttagggagtgctacaaatgtttgtcacttaaatttcaagtttctgttttaatagttaactgactatagattgttttctatgccatgtatgtgccacttctgagagtagtaaatgactctttgctacattttaaaagcaattgtattagtaagaactttgtaaataaatacctaaaaccc

SEQ ID NO: 53 - protein, 622 aa, Homo sapiens
MEGPGLGSQCRNHSHGPHPPGFGRYGICAHENKELANAREALPLIEDSSNCDIVKATQYGIFERCKELVEAGYDVRQPDKENVSLLHWAAINNRLDLVKFYISKGAVVDQLGGDLNSTPLHWAIRQGHLPMVILLLQHGADPTLIDGEGFSSIHLAVLFQHMPIIAYLISKGQSVNMTDVNGQTPLMLSAHKVIGPEPTGFLLKFNPSLNVVDKIHQNTPLHWAVAAGNVNAVDKLLEAGSSLDIQNVKGETPLDMALQNKNQLIIHMLKTEAKMRANQKFRLWRWLQKCELFLLLMLSVITMWAIGYILDFNSDSWLLKGCLLVTLFFLTSLFPRFLVGYKNLVYLPTAFLLSSVFWIFMTWFILFFPDLAGAPFYFSFIFSIVAFLYFFYKTWATDPGFTKASEEEKKVNIITLAETGSLDFRTFCTSCLIRKPLRSLHCHVCNCCVARYDQHCLWTGRCIGFGNHHYYIFFLFFLSMVCGWIIYGSFIYLSSHCATTFKEDGLWTYLNQIVACSPWVLYILMLATFHFSWSTFLLLNQLFQIAFLGLTSHERISLQKQSKHMKQTLSLRKTPYNLGFMQNLADFFQCGCFGLVKPCVVDWTSQYTMVFHPAREKVLRSV

SEQ ID NO: 54 - DNA, 2426 bp, Homo sapiens
  CDS (104)..(1969)
gcgccagcaggaagtgggagaagaggcgacccaaggcgggctggcgggctggcggcagtcgctacttgcctagtagcctcagccgctgtgggctcctggggagatggaggggccggggctgggctcgcagtgcaggaatcacagccatggcccccaccctccaggatttggtcgatatggcatctgtgcacatgaaaacaaagaacttgccaatgcaagagaagctcttcctcttatagaggactctagtaactgtgacattgtcaaagctactcaatacggaatttttgaacgatgtaaagagttggtagaagcaggatatgatgtcaggcaaccagataaagaaaatgtgtcgcttcttcattgggctgctattaacaacagactggatcttgtaaagttttatatttcaaaaggtgctgttgtagatcagttgggtggagatttaaattcaactcctcttcactgggccatccgacaaggacatttacctatggtcatattattactccagcatggtgcagaccccactcttattgatggagagggattcagcagcatccacctggcagtattgtttcaacacatgcctattatagcatatctcatctcaaagggacagagtgtgaatatgacagatgtaaatgggcagacacctctcatgttatcagctcacaaagtaattgggccagaaccaactggatttcttttaaagtttaatccttctctcaatgtggttgataaaatacaccaaaacactccacttcactgggcagttgcagcaggaaatgttaatgcagttgataagcttttggaagctggttctagcctggatatccagaatgttaagggagaaacacctcttgatatggctctacaaaacaaaaatcagctcattattcatatgctaaaaacagaagccaaaatgagagccaaccaaaagttcagactttggaggtggctgcagaaatgcgagctcttcctgctgctgatgctttctgtgattaccatgtgggctattggatacatattggacttcaattcagattcttggcttttaaaaggatgtcttctagtaacactgttttttctgacatctttgtttccaaggttcttggttgggtataagaaccttgtatacttaccaacagcctttctgctaagttctgttttttggatatttatgacttggttcatcttattttttcctgatttagcaggagcccctttctatttcagtttcattttcagcatagtagcctttctatactttttctataagacttgggcaactgatccaggcttcactaaggcttctgaagaagaaaagaaagtgaatatcatcacccttgcagaaactggctctctggacttcagaacattttgtacatcatgtcttataaggaagccattaaggtcactccactgccatgtatgcaactgctgtgtggctcgatatgatcaacactgcctgtggactggacggtgcataggttttggcaaccatcactattacatattcttcttgtttttcctttccatggtatgtggctggattatatatggatctttcatctatttgtccagtcattgtgccacaacattcaaagaagatggattatggacttacctcaatcagattgtggcctgttccccttgggttttatatatcttgatgctagcaactttccatttctcatggtcaacatttttattattaaatcaactctttcagattgcctttctgggcctgacctcccatgagagaatcagcctgcagaagcagagcaagcatatgaaacagacgttgtccctcaggaagacaccatacaatcttggattcatgcagaacctggcagatttctttcagtgtggctgctttggcttggtgaagccctgtgtggtagattggacatcacagtacaccatggtctttcacccagccagggagaaggttcttcgctcagtatgaagaaaagcaacccaaaactctcaatctgatttgtttttgtttatgtcgatgccctgtagtttgaaagtgaagtaaagatttagaattcacctaagtccaaaggaaaacacgtggtttttaaagccattaggtaaaaaaagttctcaataaaggcattacaattttttaggtttagaaagatggacttttctgataaatcttggcagacatctaaaaaaaaaaccatatttttcacaagaaaatgcaagttactttttttggaaataatactcactgattatggataaaatggaatattttcagatactatattggctgtttcaaaatagtactattctttaaacttgtaatttttgctaagttatttgtctttgttgtatctataaatatgtaaaaaatatttaaatagatgtacctgttttgctttcacacttaataaaaaatttttttttgt

SEQ ID NO: 55 - protein, 257 aa, Homo sapiens
MASKIGSRRWMLQLIMQLGSVLLTRCPFWGCFSQLMLYAERAEARRKPDIPVPYLYFDMGAAVLCASFMSFGVKRRWFALGAALQLAISTYAAYIGGYVHYGDWLKVRMYSRTVAIIGGFLVLASGAGELYRRKPRSRSLQSTGQVFLGIYLICVAYSLQHSKEDRLAYLNHLPGGELMIQLFFVLYGILALAFLSGYYVTLAAQILAVLLPPVMLLIDGNVAYWHNTRRVEFWNQMKLLGESVGIFGTAVILATDG

SEQ ID NO: 56 - DNA, 1520 bp, Homo sapiens
  CDS (10)..(780)
tttcccaagatggcgtcgaagataggttcgagacggtggatgttgcagctgatcatgcagttgggttcggtgctgctcacacgctgccccttttggggctgcttcagccagctcatgctgtacgctgagagggctgaggcacgccggaagcccgacatcccagtgccttacctgtatttcgacatgggggcagccgtgctgtgcgctagtttcatgtcctttggcgtgaagcggcgctggttcgcgctgggggccgcactccaattggccattagcacctacgccgcctacatcgggggctacgtccactacggggactggctgaaggtccgtatgtactcgcgcacagttgccatcatcggcggctttcttgtgttggccagcggtgctggggagctgtaccgccggaaacctcgcagccgctccctgcagtccaccggccaggtgttcctgggtatctacctcatctgtgtggcctactcactgcagcacagcaaggaggaccggctggcgtatctgaaccatctcccaggaggggagctgatgatccagctgttcttcgtgctgtatggcatcctggccctggcctttctgtcaggctactacgtgaccctcgctgcccagatcctggctgtactgctgccccctgtcatgctgctcattgatggcaatgttgcttactggcacaacacgcggcgtgttgagttctggaaccagatgaagctccttggagagagtgtgggcatcttcggaactgctgtcatcctggccactgatggctgagttttatggcaagaggctgagatgggcacagggagccactgagggtcaccctgccttcctccttgctggcccagctgctgtttatttatgctttttggtctgtttgtttgatcttttgcttttttaaaattgttttttgcagttaagaggcagctcatttgtccaaatttctgggctcagcgcttgggagggcaggagccctggcactaatgctgtacaggtttttttcctgttaggagagctgaggccagctgcccactgagtctcctgtccctgagaagggagtatggcagggctgggatgcggctactgagagtgggagagtgggagacagaggaaggaagatggagattggaagtgagcaaatgtgaaaaattcctctttgaacctggcagatgcagctaggctctgcagtgctgtttggagactgtgagagggagtgtgtgtgttgacacatgtggatcaggcccaggaagggcacaggggctgagcactacagaagtcacatgggttctcagggtatgccaggggcagaaacagtaccggctctctgtcactcaccttgagagtagagcagaccctgttctgctctgggctgtgaaggggtggagcaggcagtggccagctttgcccttcctgctgtctctgtttctagctccatggttggcctggtgggggtggagttccctcccaaacaccagaccacacagtcctccaaaaataaacattttatatag

SEQ ID NO: 57 - protein, 107 aa, Homo sapiens
MALFAGGKLRVHLDIQVGEHANNYPEIAAKDKLTELQLRARQLLDQVEQIQKEQDYQRYREERFRLTSESTNQRVLWWSIAQTVILILTGIWQMRHLKSFFEAKKLV

SEQ ID NO: 58 - DNA, 1496 bp, Homo sapiens
  CDS (9)..(329)
ctaccaggatggctctcttcgctggtggcaaactgcgtgtgcatctcgacatccaggttggggagcatgccaacaactaccctgagattgctgcaaaagataagctgacggagctacagctccgcgcccgccagttgcttgatcaggtggaacagattcagaaggagcaggattaccaaaggtatcgtgaagagcgcttccgactgacgagcgagagcaccaaccagagggtcctatggtggtccattgctcagactgtcatcctcatcctcactggcatctggcagatgcgtcacctcaagagcttctttgaggccaagaagctggtgtagtgccctctttgtatgacccttcctttttacctcatttatttggtactttccccacacagtcctttatccacctggatttttagggaaaaaaaatgaaaaagaataagtcacattggttccatggccacaaaccattcagatcagccacttgctgaccctggttcttaaggacacatgacattagtccaatctttcaaaatcttgtcttagggcttgtgaggaatcagaactaacccaggactcagtcctgcttcttttgcctcgagtgattttcctctgtttttcactaaataagcaaatgaaaactctctccattaccttctgctttctctttgtccacttacgcagtaggtgactggcatgtgccacagagcaggccctgcctcactgtctgctggtcagttctgggttcacttaatggctttgtgaatgtaaataaggggcaggtcttggccctagaggattgagatgtttttctatatcttagaactatttttggataaattatatattttccttcctagtagaagtgttactgcctgtaactagctcaaaataccaatgcagtttctgcattctgggttttgtttttcttttttttttttttttttttgagttttgctcttgtcgcccaggctggagtgcaatggcgtgatctcagctcactggcaacatctgcctcccgggttcaaatgattctcctgcctcagtctcctgagtagctgggattacaggtgcccgccaccacgctcagctaatttttgtatttttagtagagatggggttttaccatgttggccaggctggtcttagactcctgacctcagttgatccacctgcctcagcctctgcattcagtttattcacatatttttggtaactcccatggcagctcctaggatttcagcggtctgtgggccagaaagcaggcaccagggctgacctcaaggccgtatcagagggccaagcagagttcttttggatacctgcttttcatcccacagggccttagagtcagaggtaaggtagcaacagagctagaatggggcaatgcactcttaccctccttctcaacttttatttaagctgtgctaaatgttttcttcaagggaaccagatttagttctttacagaattttccagtgaaataaaacatgttgtaat

SEQ ID NO: 59 - protein, 272 aa, Homo sapiens
MMIHGFQSSHRDFCFGPWKLTASKTHIMKSADVEKLADELHMPSLPEMMFGDNVLRIQHGSGFGIEFNATDALRCVNNYQGMLKVACAEEWQESRTEGEHSKEVIKPYDWTYTTDYKGTLLGESLKLKVVPTTDHIDTEKLKAREQIKFFEEVLLFEDELHDHGVSSLSVKIRVMPSSFFLLLRFFLRIDGVLIRMNDTRLYHEADKTYMLREYTSRESKISSLMHVPPSLFTEPNEISQYLPIKEAVCEKLIFPERIDPNPADSQKSTQVE

SEQ ID NO: 60 - DNA, 1916 bp, Homo sapiens
  CDS (117)..(932)
atggtaacggctcggaagcctaggaggctgggccggagggaggcggaggaaccggtgttcgccgccgccgctgcttcagcttattccttgtggcctctgcgggtcctgcctcagccatgatgatccacggcttccagagcagccaccgggatttctgcttcgggccctggaagctgacggcgtccaagacccacatcatgaagtcggcggatgtggagaaattagccgatgaattacatatgccatctctccctgaaatgatgtttggagacaacgttttaagaatccagcatgggtctggctttggaattgagttcaatgctacagatgcgttaagatgtgtaaacaactaccaaggaatgcttaaagtggcctgtgctgaagagtggcaagaaagcaggacggagggtgaacactccaaagaggttattaaaccatatgattggacctatacaacagattataagggaaccttacttggagaatctcttaagttaaaggttgtacctacaacagatcatatagatacagaaaaattgaaagccagagaacagattaagttttttgaagaagttctcctttttgaggatgaacttcatgatcatggagtttcaagcctgagtgtgaagattagagtaatgccttctagctttttcctgctgttgcggtttttcttgagaattgatggggtgcttatcagaatgaatgacacgagactttaccatgaggctgacaagacctacatgttacgagaatatacgtcacgagaaagcaaaatttctagtttgatgcatgttccaccttccctcttcacggaacctaatgaaatatcccagtatttaccaataaaggaagcagtttgtgagaagctaatatttccagaaagaattgatcctaacccagcagactcacaaaaaagtacacaagtggaataaaatgtgatacaacatatactcactatggaatctgactggacaccttggctatttgtaaggggttatttttattatgagaattaattgccttgtttatgtacagattttctgtagccttaaaggaaaaaaaaataaagatcgttacaggcaggtttcactcaactgctatttgtactgtctgtcttcacattcatattccagatttatattttctggagttaaatttggatgatttctaaattatcacaaagtgggacctcagcagtagtgatgtgtgtgtctcatgagcagtgagcacagtctgcattcatcatgaaacactatcttctaccaggaggaggttaatgtaaatcaccaaatcccaatgccttgtgactttcataggattcctgatcatgcatgttgatgtactggctcttcactttgggctttctgatgtttattcacacctttggagagttgcaacttgccacatacgaaattagtctcatagtgtagtgaacttcaaccccaaaattttaaaaatgtatttccccccagttttaaattgcctttgaaatttaaaaaaaaaaatttagacttagtaccagaaccaaaaatacctagatttttggagaacttattacatacatagaaacatgaatatggtttaccwctgtgtgtgtgtgtgtgtgtgtgtgtatacagacttttttttttaacttgttgattcagatgtcttggtccctgaatagtcctagattacttattttgagaattgattgttaaaaattacagggaattaaaataattgcctttttttttttagagggtaagagatgggtagaagagtatgcctctgaaaattttattagtttattcttgtggagaataccaagaaaatgtgtatttgcccattgctaaatatgatatatgccattttgtatttatttgtcccaagtgtctttttttaagaggagaataaacaataaggaattactg

SEQ ID NO: 61 - protein, 219 aa, Homo sapiens
MNRLFGKAKPKAPPPSLTDCIGTVDSRAESIDKKISRLDAELVKYKDQIKKMREGPAKNMVKQKALRVLKQKRMYEQQRDNLAQQSFNMEQANYTIQSLKDTKTTVDAMKLGVKEMKKAYKQVKIDQIEDLQDQLEDMMEDANEIQEALSRSYGTPELDEDDLEAELDALGDELLADEDSSYLDEAASAPAIPEGVPTDTKNKDGVLVDEFGLPQIPAS

SEQ ID NO: 62 - DNA, 1362 bp, Homo sapiens
  CDS (49)..(705)
gttttctggttttgctctagtgtttgggtttcttcgcggctgctcaagatgaaccgactcttcgggaaagcgaaacccaaggctccgccgcccagcctgactgactgcattggcacggtggacagtagagcagaatccattgacaagaagatttctcgattggatgctgagctagtgaagtataaggatcagatcaagaagatgagagagggtcctgcaaagaatatggtcaagcagaaagccttgcgagttttaaagcaaaagaggatgtatgagcagcagcgggacaatcttgcccaacagtcattcaacatggaacaagccaattataccatccagtctttgaaggacaccaagaccacggttgatgctatgaaactgggagtaaaggaaatgaagaaggcatacaagcaagtgaagatcgaccagattgaggatttacaagaccagctagaggatatgatggaagatgcaaatgaaatccaagaagcactgagtcgcagttatggcaccccagaactggatgaagatgatttagaagcagagttggatgcactaggtgatgagcttctggctgatgaagacagttcttatttggatgaggcagcatctgcacctgcaattccagaaggtgttcccactgatacaaaaaacaaggatggagttctggtggatgaatttggattgccacagatccctgcttcatagatttgcatcattcaagcatatcttgtaaaacaaacacatattatgggactaggaaatatttatctttccaaatttgccataacagatttaggtttctttcctttctttgaaggaaagtttaattacattgctcttttattttttccattaagagactcattgcttgggaaatgctttcttcgtactaaaatttgattccttttttttcttatgaaaaacgaactcagtttaaaagtatttttagctcgtatgacttgttttcattcattaataataatttgaaataaaactaaggaaatggaatcttaaaagtctatgacagtgtaactctacagtctcaaaatgacctgataaattgataagacaaagatgagattattggggctgttcatattatgattcagaatcattttctattgtggtattataggttggttaaagtgatggcctttttgatgggttttgttgtgtcttgtgaacaagtcgttactgtgtccattattggaatggaattatcactactgtatcatgagtgggtattttgattctatggttccctcagtattacatcttgacttgtaatcaattatgaatatttcttgatatttaatgtataggacatttatttatactcaataaatatttttcaaaagg

SEQ ID NO: 63 - protein, 622 aa, Homo sapiens
MADGPDEYDTEAGCVPLLHPEEIKPQSHYNHGYGEPLGRKTHIDDYSTWDIVKATQYGIYERCRELVEAGYDVRQPDKENVTLLHWAAINNRIDLVKYYISKGAIVDQLGGDLNSTPLHWATRQGHLSMVVQLMKYGADPSLIDGEGCSCIHLAAQFGHTSIVAYLIAKGQDVDMMDQNGMTPLMWAAYRTHSVDPTRLLLTFNVSVNLGDKYHKNTALHWAVLAGNTTVISLLLEAGANVDAQNIKGESALDLAKQRKNVWMINHLQEARQAKGYDNPSFLRKLKADKEFRQKVMLGTPFLVIWLVGFIADLNIDSWLIKGLMYGGVWATVQFLSKSFFDHSMHSALPLGIYLATKFWMYVTWFFWFWNDLNFLFIHLPFLANSVALFYNFGKSWKSDPGIIKATEEQKKKTIVELAETGSLDLSIFCSTCLIRKPVRSKHCGVCNRCIAKFDHHCPWVGNCVGAGNHRYFMGYLFFLLFMICWMIYGCISYWGLHCETTYTKDGFWTYITQIATCSPWMFWMFLNSVFHFMWVAVLLMCQMYQISCLGITTNERMNARRYKHFKVTTTSIESPFNHGCVRNIIDFFEFRCCGLFRPVIVDWTRQYTIEYDQISGSGYQLV

SEQ ID NO: 64 - DNA, 2948 bp, Homo sapiens
  CDS (14)..(1879)
atttaacaccaagatggcggacggcccggatgagtacgataccgaagcgggctgtgtgccccttctccacccagaggaaatcaaaccccaaagccattataaccatggatatggtgaacctcttggacggaaaactcatattgatgattacagcacatgggacatagtcaaggctacacaatatggaatatatgaacgctgtcgagaattggtggaagcaggttatgatgtacggcaaccggacaaagaaaatgttaccctcctccattgggctgccatcaataacagaatagatttagtcaaatactatatttcgaaaggtgctattgtggatcaacttggaggggacctgaattcaactccattgcactgggccacaagacaaggccatctatccatggttgtgcaactaatgaaatatggtgcagatccttcattaattgatggagaaggatgtagctgtattcatctggctgctcagttcggacatacctcaattgttgcttatctcatagcaaaaggacaggatgtagatatgatggatcagaatggaatgacgcctttaatgtgggcagcatatagaacacatagtgtggatccaactagattgcttttaacattcaatgtttcagttaaccttggtgacaagtatcacaaaaacactgctctgcattgggcagtgctagcagggaataccacagtcattagccttcttctggaagctggagctaatgttgatgcccagaatatcaagggcgaatcagcgcttgatttggcaaaacagagaaaaaatgtgtggatgatcaaccacttacaagaggcaaggcaagcaaaaggatatgacaatccgtccttccttagaaagctgaaagctgataaggaatttcggcagaaagtaatgttaggaactcctttcctagttatttggctggttgggtttatagcagacctaaatattgattcttggctcattaaagggctaatgtatggtggtgtttgggctacagtacagtttctttcaaaatcctttttcgatcattcaatgcatagtgcattgccccttgggatatatttggcaaccaaattctggatgtatgtgacgtggttcttctggttttggaatgatctcaactttttatttatccatcttccattccttgccaatagtgttgcacttttctacaattttggaaaatcttggaaatcagatccagggattattaaagcaacagaagagcaaaagaaaaagacaatagttgaacttgcagagacaggaagtctggacctcagtatattctgcagtacctgtttgatacgaaaaccggtgaggtccaaacattgtggtgtgtgcaaccgctgtatagcaaaatttgatcatcattgcccatgggtgggtaactgtgtaggtgcaggcaaccatagatattttatgggctacctattcttcttgctttttatgatctgctggatgatttatggttgtatatcttactggggactccactgtgagaccacttacaccaaggatggattttggacatacattactcagattgccacgtgttcaccttggatgttttggatgttcctgaacagtgttttccacttcatgtgggtggctgtattactcatgtgtcagatgtaccagatatcatgtttaggtattactacaaatgaaagaatgaatgccaggagatacaagcactttaaagtcacaacaacgtctattgaaagcccattcaaccatggatgtgtaagaaatattatagacttctttgaatttcgatgctgtggcctctttcgtcctgttatcgtggactggaccaggcagtatacaatagaatatgaccaaatatcaggatctgggtaccagctggtgtagcgacatcttatcctatgaagcatattgctgagtggtgcctgaaaattgtgtctgtccgtgtctttctcacactcgaatccacatcctttgaacaagagcatgctatgtgtagggctaatggtgaattttacagtctttttttcaacacttttattaacaaaagtaaacatggacagaacacactgccatttctgggaagagtaaagatgataaaaaataattttaatggttcttaatgtggaaattcacaacatactcaacttttgggttttgttctcacagtatttttcacaaaaaaagggtaaacttattctattgacagacatggtgtactgatcagaaatgttcagttttaactaaaactaaatttatgttatttggctaaatgttatgatgcagtctagtacgagtattgcatctaattccaggagcattgttttaagttgattgactagttattatgtacatttcagaatgtacacataaatactgtgatgaaaatcatgtgattgggatctactgtgatgttgtcttcaaaggcaggagaaaataatgttcacaataaaatgtgctaacaatgttttgtttctatcagctgttgcaatgctgatatatttctagttcagtgaaataatttgtagtaaccttactctgaggttttacggtctgataatgaagcacttgcatgagtatagtaagtcatgtttttttgttcaaatttaaaagccctgctaattgcatgacacaccacatagaatgtatactagcagatactatccagtgaagcataaattagaatttaatttgatgttcaaaaacagttccatttttaagggttaaggtggtattttcaagaaaaggcagaacaaataatgcaaaattctcagtaatagtgatacatggatatacttccttttaaattctcagctgcaaaataattgtagacaaaataatggcatttaactaaagatggagcatgatctgtgtacatagcacatgtgaataaaagaaaagctgacagtatattctggtttcaataaaatgacctatcagaaagtagaatttc

SEQ ID NO: 65 - protein, 632 aa, Homo sapiens
MQREEGFNTKMADGPDEYDTEAGCVPLLHPEEIKPQSHYNHGYGEPLGRKTHIDDYSTWDIVKATQYGIYERCRELVEAGYDVRQPDKENVTLLHWAAINNRIDLVKYYISKGAIVDQLGGDLNSTPLHWATRQGHLSMVVQLMKYGADPSLIDGEGCSCIHLAAQFGHTSIVAYLIAKGQDVDMMDQNGMTPLMWAAYRTHSVDPTRLLLTFNVSVNLGDKYHKNTALHWAVLAGNTTVISLLLEAGANVDAQNIKGESALDLAKQRKNVWMINHLQEARQAKGYDNPSFLRKLKADKEFRQKVMLGTPFLVIWLVGFIADLNIDSWLIKGLMYGGVWATVQFLSKSFFDHSMHSALPLGIYLATKFWMYVTWFFWFWNDLNFLFIHLPFLANSVALFYNFGKSWKSDPGIIKATEEQKKKTIVELAETGSLDLSIFCSTCLIRKPVRSKHCGVCNRCIAKFDHHCPWVGNCVGAGNHRYFMGYLFFLLFMICWMIYGCISYWGLHCETTYTKDGFWTYITQIATCSPWMFWMFLNSVFHFMWVAVLLMCQMYQISCLGITTNERMNARRYKHFKVTTTSIESPFNHGCVRNIIDFFEFRCCGLFRPVIVDWTRQYTIEYDQISGSGYQLV

SEQ ID NO: 66 - DNA, 4715 bp, Homo sapiens
  CDS (108)..(2003)
gaagaaggaggaggaggcccgcgtcgcctccggcggggctcgcgctcgccccgcgctcgccctccgcctcgcccgagccccgggagggtgaaacgctttctcccagcatgcagcgggaggagggatttaacaccaagatggcggacggcccggatgagtacgataccgaagcgggctgtgtgccccttctccacccagaggaaatcaaaccccaaagccattataaccatggatatggtgaacctcttggacggaaaactcatattgatgattacagcacatgggacatagtcaaggctacacaatatggaatatatgaacgctgtcgagaattggtggaagcaggttatgatgtacggcaaccggacaaagaaaatgttaccctcctccattgggctgccatcaataacagaatagatttagtcaaatactatatttcgaaaggtgctattgtggatcaacttggaggggacctgaattcaactccattgcactgggccacaagacaaggccatctatccatggttgtgcaactaatgaaatatggtgcagatccttcattaattgatggagaaggatgtagctgtattcatctggctgctcagttcggacatacctcaattgttgcttatctcatagcaaaaggacaggatgtagatatgatggatcagaatggaatgacgcctttaatgtgggcagcatatagaacacatagtgtggatccaactagattgcttttaacattcaatgtttcagttaaccttggtgacaagtatcacaaaaacactgctctgcattgggcagtgctagcagggaataccacagtcattagccttcttctggaagctggagctaatgttgatgcccagaatatcaagggcgaatcagcgcttgatttggcaaaacagagaaaaaatgtgtggatgatcaaccacttacaagaggcaaggcaagcaaaaggatatgacaatccgtccttccttagaaagctgaaagctgataaggaatttcggcagaaagtaatgttaggaactcctttcctagttatttggctggttgggtttatagcagacctaaatattgattcttggctcattaaagggctaatgtatggtggtgtttgggctacagtacagtttctttcaaaatcctttttcgatcattcaatgcatagtgcattgccccttgggatatatttggcaaccaaattctggatgtatgtgacgtggttcttctggttttggaatgatctcaactttttatttatccatcttccattccttgccaatagtgttgcacttttctacaattttggaaaatcttggaaatcagatccagggattattaaagcaacagaagagcaaaagaaaaagacaatagttgaacttgcagagacaggaagtctggacctcagtatattctgcagtacctgtttgatacgaaaaccggtgaggtccaaacattgtggtgtgtgcaaccgctgtatagcaaaatttgatcatcattgcccatgggtgggtaactgtgtaggtgcaggcaaccatagatattttatgggctacctattcttcttgctttttatgatctgctggatgatttatggttgtatatcttactggggactccactgtgagaccacttacaccaaggatggattttggacatacattactcagattgccacgtgttcaccttggatgttttggatgttcctgaacagtgttttccacttcatgtgggtggctgtattactcatgtgtcagatgtaccagatatcatgtttaggtattactacaaatgaaagaatgaatgccaggagatacaagcactttaaagtcacaacaacgtctattgaaagcccattcaaccatggatgtgtaagaaatattatagacttctttgaatttcgatgctgtggcctctttcgtcctgttatcgtggactggaccaggcagtatacaatagaatatgaccaaatatcaggatctgggtaccagctggtgtagcgacatcttatcctatgaagcatattgctgagtggtgcctgaaaattgtgtctgtccgtgtctttctcacactcgaatccacatcctttgaacaagagcatgctatgtgtagggctaatggtgaattttacagtctttttttcaacacttttattaacaaaagtaaacatggacagaacacactgccatttctgggaagagtaaagatgataaaaaataattttaatggttcttaatgtggaaattcacaacatactcaacttttgggttttgttctcacagtatttttcacaaaaaaagggtaaacttattctattgacagacatggtgtactgatcagaaatgttcagttttaactaaaactaaatttatgttatttggctaaatgttatgatgcagtctagtacgagtattgcatctaattccaggagcattgttttaagttgattgactagttattatgtacatttcagaatgtacacataaatactgtgatgaaaatcatgtgattgggatctactgtgatgttgtcttcaaaggcaggagaaaataatgttcacaataaaatgtgctaacaatgttttgtttctatcagctgttgcaatgctgatatatttctagttcagtgaaataatttgtagtaaccttactctgaggttttacggtctgataatgaagcacttgcatgagtatagtaagtcatgtttttttgttcaaatttaaaagccctgctaattgcatgacacaccacatagaatgtatactagcagatactatccagtgaagcataaattagaatttaatttgatgttcaaaaacagttccatttttaagggttaaggtggtattttcaagaaaaggcagaacaaataatgcaaaattctcagtaatagtgatacatggatatacttccttttaaattctcagctgcaaaataattgtagacaaaataatggcatttaactaaagatggagcatgatctaagtacatagcacatgtgaataaaagaaaagctgacagtatattctggtttcaataaaatgacctatcagaaagtagaatttcatccccaagagtatttcagtttatccaatattgagtaagttctgaaacagttttagaaaaaattttctttttgttaaatgtgatgcactgatcaatttttgtcacagcattttcataccttcatggtggactactagtcactgcttccataaatattgtttacagggtgagatttggtttattcatcttaagtgctgtagcaaactgtggttcgagcaacctgtgggaaatctgtgagagggaatggggtgggagatgtgggggaatggtggtcagactgatgacagatcctagaccaatgtaaagaatgtgtatctgtatataaataatttatcaaatagttttctctttgtgtctgtgttagtgtttttaaagctgctcatttcattttgtccaaccaaaaagaaaagggagataactaatgagcttctagtgatgttcaaaattgctgttaataggcattataccctgcaagttcactgcatgtctgatgcttggtaaaactagtcttccctgtaaaatgcagattacaggtattaaagcaatctagtggtatacccgccccttgccttagtaagaggagcagtgaaatgtatatagttgatgttcagtatttccaagtaccatttttatatagtagcttatttgaccataagtcacacatcaaaaaaagattacccttagtgtatgtgttttaatattagaaaattggcatatgtactttatttttgaaaagggaagagatgggtgtggggtggcaatagcattgtgccattttgtcatagaatgtaaaaattggttaactttacaaatgtcagctagttttgactactaattgggggaaattttagataatttttaaattcaaagttatttataaaatgctagaatttgttttaattttttgtattttgagccacttcacatgaagactcagttgcatttttatcgaatacatttttatcaacagttaaagactatggtggttttttcagagtttggctaagaatgttgttaccatcttctttgtttgtggtacaatattttcagtgcaaaagagatgtcattcagttaaaaagacaaacctctagatgtgtaattacatggaaaatactagcaatgtgaatgcttttgtagtaaccatcttgtagtacctgtgaaatctataactcagaaatggtcagatggtcaggagccagctatgcagcagtataccatctgtttaattattttgtaggtcctgtgtgtggaaccaactataaacccagttctaaagttgtgtatgatggtgaacctttgggaatagttcttatcaacttaattggatacttttagcaaataggaacttaattctcagcactgaacatgaattacttccttggagttttttttcattcatatttttgttgtttccaggaatttatttgatattaatgggcgtaaaacagcatcattgtacttaagctatggatgtttttattttatattttctttatttataactgtgccaagtattattttgctacttaccgtgttattctgtggaaagaaaaacctgtaaagtgtttaataaattagccctccttacataaattaaatgtcaaaattttgtaaaatattaatcagaataaatactgactctt

SEQ ID NO: 67 - protein, 498 aa, Homo sapiens
MARLEVIELPHSPQNLLVSPNSSHSHAVVLSWVRPFDGNSPILYYIVELSENNSPWKVHLSNVGPEMTGVTVSGLTPARTYQFRVCAVNEVGRGQYSAETSRLMLPEEPPSAPPKNIVASGRTNQSIMVQWQPPPETEHNGVLRGYILRYRLAGLPGEYQQRNITSPEVNYCLVTDLIIWTQYEIQVAAYNGAGLGVFSRAVTEYTLQGVPTAPPQNVQTEAVNSTTIQFLWNPPPQQFINGINQGYKLLAWPADAPEAVTVVTIAPDFHGVHHGHITNLKKFTAYFTSVLCFTTPGDGPPSTPQLVWTQEDKPGAVGHLSFTEILDTSLKVSWQEPLEKNGIITGYQISWEVYGRNDSRLTHTLNSTMHEYKIQGLSSLTTYTIDVAAVTAVGTGLVTSSTISSGVPPDLPGAPSNLVISNISPRSATLQFRPGYDGKTSISRWIVEGQMRPEGVGLPAEVTQPSHEAGLEPANLGSLWLLSLVYWCYSQKLWEFSC

SEQ ID NO: 68 - DNA, 1902 bp, Homo sapiens
  CDS (22)..(1515)
gaaggagggaatgactccaggatggcccggctggaagtgattgaactgcctcattcacctcagaacctcctggtcagccctaattcttcccacagccacgccgtggtgctctcttgggtccggccctttgatggaaacagtcctattctttattacatcgtggagctgtctgaaaacaactctccatggaaggtgcatctgtcaaacgttggccctgagatgacaggcgtcaccgtgagtggcctgactccggctcgtacctatcaattccgggtgtgcgcggtgaatgaagtgggcaggggccagtacagtgccgagacaagcaggttgatgctacctgaagaaccacccagtgctcccccgaaaaatatagtggccagtgggcggactaatcagtccattatggtccagtggcagccacccccagaaacagagcacaacggggtgttgcgtggatacatcctcaggtaccgcctggctggccttcccggagagtaccagcagcggaacatcaccagcccggaggtgaactactgcctggtgacagacctgatcatctggacacagtatgagatacaggtggcggcgtacaacggggccggtctgggcgtcttcagcagggcagtgaccgagtacaccttgcagggagtgcccaccgcgcccccgcagaacgtgcagacggaagccgtgaactccaccaccattcagttcctgtggaaccctccgcctcagcagtttatcaatggcatcaaccagggatacaagcttctggcatggccggcagatgcccccgaggctgtcactgtggtcactattgccccagatttccacggagtccaccatggacacataacgaacctgaagaagtttaccgcctacttcacttccgttctgtgcttcaccacccctggggacgggcctcccagcacacctcagctggtctggactcaggaagacaaaccaggagctgtgggacatctgagtttcacagagatcttggacacatctctcaaggtcagctggcaggagcccctggagaaaaatggcatcattactggctatcagatctcttgggaagtgtacggcaggaacgactctcgtctcacgcacaccctgaacagcacgatgcacgagtacaagatccaaggcctctcatctctcaccacctacaccatcgacgtggccgctgtgactgccgtgggcactggcctggtgacttcatccaccatttcttctggagtgcccccagaccttcctggtgccccatccaacctggtcatttccaacatcagccctcgctccgccacccttcagttccggccaggctatgacgggaaaacgtccatctccaggtggattgttgaggggcagatgagacctgaaggtgttggattacctgccgaggtcacacagccaagccatgaagccggattggagcctgcaaacctcggaagtctgtggctgctcagcctggtgtattggtgttacagccagaaactttgggaattctcttgttagttggttagttttactgtaattttctataaagaattcatatcatctgttaatggcgacagtttttgtttcttcctttgaattttttatattctttctttctcttttttgtttcttcttctttgagtattttgtaatcttactgggagggctaaagcgtcttctatcatatcgaattgggacaatgatagaagacaatctttgttttgtcactctaaagaaattattgtaagattttatcatcaggtatgacatttacaccattgatgtaggctttttaaaaaatatatccagcctgtattgggttaagatgattcttttctgatcctgatttcctaggagttggtttttttttttttaaagcataaataaatttaattgcatcag

SEQ ID NO: 69 - protein, 498 aa, Homo sapiens
MARLEVIELPHSPQNLLVSPNSSHSHAVVLSWVRPFDGNSPILYYIVELSENNSPWKVHLSNVGPEMTGVTVSGLTPARTYQFRVCAVNEVGRGQYSAETSRLMLPEEPPSAPPKNIVASGRTNQSIMVQWQPPPETEHNGVLRGYILRYRLAGLPGEYQQRNITSPEVNYCLVTDLIIWTQYEIQVAAYNGAGLGVFSRAVTEYTLQGVPTAPPQNVQTEAVNSTTIQFLWNPPPQQFINGINQGYKLLAWPADAPEAVTVVTIAPDFHGVHHGHITNLKKFTAYFTSVLCFTTPGDGPPSTPQLVWTQEDKPGAVGHLSFTEILDTSLKVSWQEPLEKNGIITGYQISWEVYGRNDSRLTHTLNSTTHEYKIQGLSSLTTYTIDVAAVTAVGTGLVTSSTISSGVPPDLPGAPSNLVISNISPRSATLQFRPGYDGKTSISRWIVEGQMRHQGVGLPAEVTQPSHEAGLEPANLGSLWLLSLVYWCYSQKLWEFSC

SEQ ID NO: 70 - DNA, 1902 bp, Homo sapiens
  CDS (22)..(1515)
gaaggagggaatgactccaggatggcccggctggaagtgattgaactgcctcattcacctcagaacctcctggtcagccctaattcttcccacagccacgccgtggtgctctcttgggtccggccctttgatggaaacagtcctattctttattacatcgtggagctgtctgaaaacaactctccatggaaggtgcatctgtcaaacgttggccctgagatgacaggcgtcaccgtgagtggcctgactccggctcgtacctatcaattccgggtgtgcgcggtgaatgaagtgggcaggggccagtacagtgccgagacaagcaggttgatgctacctgaagaaccacccagtgctcccccgaaaaatatagtggccagtgggcggactaatcagtccattatggtccagtggcagccacccccagaaacagagcacaacggggtgttgcgtggatacatcctcaggtaccgcctggctggccttcccggagagtaccagcagcggaacatcaccagcccggaggtgaactactgcctggtgacagacctgatcatctggacacagtatgagatacaggtggcggcgtacaacggggccggtctgggcgtcttcagcagggcagtgaccgagtacaccttgcagggagtgcccaccgcgcccccgcagaacgtgcagacggaagccgtgaactccaccaccattcagttcctgtggaaccctccgcctcagcagtttatcaatggcatcaaccagggatacaagcttctggcatggccggcagatgcccccgaggctgtcactgtggtcactattgccccagatttccacggagtccaccatggacacataacgaacctgaagaagtttaccgcctacttcacttccgttctgtgcttcaccacccctggggacgggcctcccagcacacctcagctggtctggactcaggaagacaaaccaggagctgtgggacatctgagtttcacagagatcttggacacatctctcaaggtcagctggcaggagcccctggagaaaaatggcatcattactggctatcagatctcttgggaagtgtacggcaggaacgactctcgtctcacgcacaccctgaacagcacgacgcacgagtacaagatccaaggcctctcatctctcaccacctacaccatcgacgtggccgctgtgactgccgtgggcactggcctggtgacttcatccaccatttcttctggagtgcccccagaccttcctggtgccccatccaacctggtcatttccaacatcagccctcgctccgccacccttcagttccggccaggctatgacgggaaaacgtccatctccaggtggattgttgaggggcagatgagacatcaaggtgttggattacctgccgaggtcacacagccaagccatgaagccggattggagcctgcaaacctcggaagtctgtggctgctcagcctggtgtattggtgttacagccagaaactttgggaattctcttgttagttggttagttttactgtaattttctataaagaattcatatcatctgttaatggcgacagtttttgtttcttcctttgaattttttatattctttctttctcttttttgtttcttcttctttgagtattttgtaatcttactgggagggctaaagcgtcttctatcatatcgaattgggacaatgatagaagacaatctttgttttgtcactctaaagaaattattgtaagattttatcatcaggtatgacatttacaccattgatgtaggctttttaaaaaatatatccagcctgtattgggttaagatgattcttttctgatcctgatttcctaggagttggtttttttttttttaaagcataaataaatttaattgcatcag

SEQ ID NO: 71 - protein, 245 aa, Homo sapiens
MPVQLSEHPEWNESMHSLRISVGGLPVLASMTKAADPRFRPRWKVILTFFVGAAILWLLCSHRPAPGRPPTHNAHNWRLGQAPANWYNDTYPLSPPQRTPAGIRYRIAVIADLDTESRAQEENTWFSYLKKGYLTLSDSGDKVAVEWDKDHGVLESHLAEKGRGMELSDLIVFNGKLYSVDDRTGVVYQIEGSKAVPWVILSDGDGTVEKGFKAEWLAVREIVRKRWRLVKQVSHVGVLGQWIQR

SEQ ID NO: 72 - DNA, 1551 bp, Homo sapiens
  CDS (127)..(861)
ggaagtcggccaccttcctccgtcccggccgttagcccagccaagcccagccaagcccagccaagccccgccgatcgcgggcaccggagccagccccgcagcgggtcccgcctgtctgtcacgctgatgcccgtgcagctgtctgagcacccggaatggaatgagtctatgcactccctccggatcagtgtggggggccttcctgtgctggcgtccatgaccaaggccgcggacccccgcttccgcccccgctggaaggtgatcctgacgttctttgtgggtgctgccatcctctggctgctctgctcccaccgcccggcccccggcaggccccccacccacaatgcacacaactggaggctcggccaggcgcccgccaactggtacaatgacacctaccccctgtctcccccacaaaggacaccggctgggattcggtatcgaatcgcagttatcgcagacctggacacagagtcaagggcccaagaggaaaacacctggttcagttacctgaaaaagggctacctgaccctgtcagacagtggggacaaggtggccgtggaatgggacaaagaccatggggtcctggagtcccacctggcggagaaggggagaggcatggagctatccgacctgattgttttcaatgggaaactctactccgtggatgaccggacgggggtcgtctaccagatcgaaggcagcaaagccgtgccctgggtgattctgtccgacggcgacggcaccgtggagaaaggcttcaaggccgaatggctggcagtgcgggagattgtaaggaagcggtggcggctggtgaagcaagtctcacatgtcggcgttcttggccaatggatacaaagataaagaaaatgttgcctttttctaggaactgtcagaaatcctcatgcctttcaagacttctgtgaatgacttgaattttttattccctgcctagggtctgtgaacgaggcctgtctcttccctggggtttctttccatggcctttatttctcctcttccagtgggagttttgcaggctcttctctgtggaaacttcacgagcgttggctgggcctcggcttcgctggagtgtactccagggtgaaggcagagtgggatttgagacccaggtagtggaggaagcgaaggaagtgaacgctgaatgtgacgcatttctgaagagctcagctgtcaccgggcatagcctggaagccccaagtctgttctgactttgcctggctgtctccttgacccgcctcctagatcattgtccttgatgtccaggctgggtcatttaaaatagagatgcaatcaggaaggttgggggacttgggactgtggctgaattgagaccttgctgatgtattcatgtcagcacctgagtcacagcccaggtgcccggaagcagcctcttcgcataggcagtgatttgcgattactttaaagctcaccttttttcttcccctctctgttcgctgctgtcagcataatgattgtgttccttccctatgggatccatctgttttgtaaacaataaagcgtctgagggag

SEQ ID NO: 73 - protein, 352 aa, Homo sapiens [sequence omitted]

SEQ ID NO: 74 - DNA, 2401 bp, Homo sapiens
  CDS (103)..(1158)
ttaggccgggggggtgcggtcctggtcggaaggaggtggagagtcgggggtcaccaggcctatccttggcgccacagtcggccaccggggctcgccgccgtcatggagagcggagggcggccctcgctgtgccagttcatcctcctgggcaccacctctgtggtcaccgccgccctgtactccgtgtaccggcagaaggcccgggtctcccaagagctcaagggagctaaaaaagttcatttgggtgaagatttaaagagtattctttcagaagctccaggaaaatgcgtgccttatgctgttatagaaggagctgtgcggtctgttaaagaaacgcttaacagccagtttgtggaaaactgcaagggggtaattcagcggctgacacttcaggagcacaagatggtgtggaatcgaaccacccacctttggaatgattgctcaaagatcattcatcagaggaccaacacagtgccctttgacctggtgccccacgaggatggcgtggatgtggctgtgcgagtgctgaagcccctggactcagtggatctgggtctagagactgtgtatgagaagttccacccctcgattcagtccttcaccgatgtcatcggccactacatcagcggtgagcggcccaaaggcatccaagagaccgaggagatgctgaaggtgggggccaccctcacaggggttggcgaactggtcctggacaacaactctgtccgcctgcagccgcccaaacaaggcatgcagtactatctaagcagccaggacttcgacagcctgctgcagaggcaggagtcgagcgtcaggctctggaaggtgctggcgctggtttttggctttgccacatgtgccaccctcttcttcattctccggaagcagtatctgcagcggcaggagcgcctgcgcctcaagcagatgcaggaggagttccaggagcatgaggcccagctgctgagccgagccaagcctgaggacagggagagtctgaagagcgcctgtgtagtgtgtctgagcagcttcaagtcctgcgtctttctggagtgtgggcacgtttgttcctgcaccgagtgctaccgcgccttgccagagcccaagaagtgccctatctgcagacaggcgatcacccgggtgatacccccgtacaacagctaatagtttggaagccgcacagcttgacctggaagcacccctgcccccttttcagggatttttatctcgaggcctttggaggagcagtggtgggggtagctgtcacctccaggtatgattgagggaggaatcgggtagaaactctccagacccatgcctccaatggcaggatgctgcctttcccacctgagaggggaccctgtccatgtgcagcctcatcagagcctcaccctgggaggatgccgtggcgtctcctcccaggagccagatcagtgcgagtgtgactgaaaatgcctcatcacttaagcaccaaagccagtgatcagcagctcttctgttcctgtgtcttctgtttttttctggtgaatcgttgcttgctgtggacttggtggaggactcagaggggaggaaaggctgggccccgagtacaacggatgccttgggtgctgcctccgaagagactctgccgcagcttttcttctttttcctcatgccccgggaaacagtctttcttcagaattgtcaggctgggcaggtcaacttgtgttcctttcccctcacctgcttgcctccttaacgcctgcacgtgtgtgtagaggacaaaagaaagtgaagtcagcacatccgcttctgcccagatggtcggggccccgggcaacagattgaagagagatcatgtgaagggcagttggtcaggcaggcctcctggtttcgccactggccctgatttgaactcctgccacttgggagagctcggggtggtccctggttttccctcctggagaatgaggcgcagaggcctcgcctcctgaaggacgcagtgtggatgccactggcctagtgtcctggcctcacagcttccttgcaaggctgtcacaaggaaaagcagccggctggcaccctgagcatatgccctcttggggctccctcatccagcccgtcgcagctttgacatcttggtgtactcatgtcgcttctccttgtgttaccccctcccagtattaccatttgcccctcacctgcccttggtgagccttttagtgcaagacagatggggctgttttcccccacctctgagtagttggaggtcacatacacagctctttttttattgcccttttctgcctctgaatgttcatctctcgtcctcctttgtgcaggcgaggaaggggtgccctcaggggccgacactagtgtgatgcagtgtccagtgtgaacagcagaaattaaacatgttgcaacc

SEQ ID NO: 75 - protein, 352 aa, Homo sapiens
MESGGRPSLCQFILLGTTSVVTAALYSVYRQKARVSQELKGAKKVHLGEDLKSILSEAPGKCVPYAVIEGAVRSVKETLNSQFVENCKGVIQRLTLQEHKMVWNRTTHLWNDCSKIIHQRTNTVPFDLVPHEDGVDVAVRVLKPLDSVDLGLETVYEKFHPSIQSFTDVIGHYISGERPKGIQETEEMLKVGATLTGVGELVLDNNSVRLQPPKQGMQYYLSSQDFDSLLQRQESSVRLWKVLALVFGFATCATLFFILRKQYLQRQERLRLKQMQEEFQEHEAQLLSRAKPEDRESLKSACVVCLSSFKSCVFLECGHVCSCTECYRALPEPKKCPICRQAITRVIPLYNS

SEQ ID NO: 76 - DNA, 2401 bp, Homo sapiens
  CDS (103)..(1158)
ttaggccgggggggtgcggtcctggtcggaaggaggtggagagtcgggggtcaccaggcctatccttggcgccacagtcggccaccggggctcgccgccgtcatggagagcggagggcggccctcgctgtgccagttcatcctcctgggcaccacctctgtggtcaccgccgccctgtactccgtgtaccggcagaaggcccgggtctcccaagagctcaagggagctaaaaaagttcatttgggtgaagatttaaagagtattctttcagaagctccaggaaaatgcgtgccttatgctgttatagaaggagctgtgcggtctgttaaagaaacgcttaacagccagtttgtggaaaactgcaagggggtaattcagcggctgacacttcaggagcacaagatggtgtggaatcgaaccacccacctttggaatgattgctcaaagatcattcatcagaggaccaacacagtgccctttgacctggtgccccacgaggatggcgtggatgtggctgtgcgagtgctgaagcccctggactcagtggatctgggtctagagactgtgtatgagaagttccacccctcgattcagtccttcaccgatgtcatcggccactacatcagcggtgagcggcccaaaggcatccaagagaccgaggagatgctgaaggtgggggccaccctcacaggggttggcgaactggtcctggacaacaactctgtccgcctgcagccgcccaaacaaggcatgcagtactatctaagcagccaggacttcgacagcctgctgcagaggcaggagtcgagcgtcaggctctggaaggtgctggcgctggtttttggctttgccacatgtgccaccctcttcttcattctccggaagcagtatctgcagcggcaggagcgcctgcgcctcaagcagatgcaggaggagttccaggagcatgaggcccagctgctgagccgagccaagcctgaggacagggagagtctgaagagcgcctgtgtagtgtgtctgagcagcttcaagtcctgcgtctttctggagtgtgggcacgtttgttcctgcaccgagtgctaccgcgccttgccagagcccaagaagtgccctatctgcagacaggcgatcacccgggtgatacccctgtacaacagctaatagtttggaagccgcacagcttgacctggaagcacccctgcccccttttcagggatttttatctcgaggcctttggaggagcagtggtgggggtagctgtcacctccaggtatgattgagggaggaatcgggtagaaactctccagacccatgcctccaatggcaggatgctgcctttcccacctgagaggggaccctgtccatgtgcagcctcatcagagcctcaccctgggaggatgccgtggcgtctcctcccaggagccagatcagtgcgagtgtgactgaaaatgcctcatcacttaagcaccaaagccagtgatcagcagctcttctgttcctgtgtcttctgtttttttctggtgaatcgttgcttgctgtggacttggtggaggactcagaggggaggaaaggctgggccccgagtacaacggatgccttgggtgctgcctccgaagagactctgccgcagcttttcttctttttcctcatgccccgggaaacagtctttcttcagaattgtcaggctgggcaggtcaacttgtgttcctttcccctcacctgcttgcctccttaacgcctgcacgtgtgtgtagaggacaaaagaaagtgaagtcagcacatccgcttctgcccagatggtcggggccccgggcaacagattgaagagagatcatgtgaagggcagttggtcaggcaggcctcctggtttcgccactggccctgatttgaactcctgccacttgggagagctcggggtggtccctggttttccctcctggagaatgaggcgcagaggcctcgcctcctgaaggacgcagtgtggatgccactggcctagtgtcctggcctcacagcttccttgcaaggctgtcacaaggaaaagcagccggctggcaccctgagcatatgccctcttggggctccctcatccagcccgtcgcagctttgacatcttggtgtactcatgtcgcttctccttgtgttaccccctcccagtattaccatttgcccctcacctgcccttggtgagccttttagtgcaagacagatggggctgttttcccccacctctgagtagttggaggtcacatacacagctctttttttattgcccttttctgcctctgaatgttcatctctcgtcctcctttgtgcaggcgaggaaggggtgccctcaggggccgacactagtgtgatgcagtgtccagtgtgaacagcagaaattaaacatgttgcaacc

SEQ ID NO: 77 - protein, 697 aa, Homo sapiens
MCKSLRYCFSHCLYLAMTRLEEVNREVNMHSSVRYLGYLARINLLVAICLGLYVRWEKTANSLILVIFILGLFVLGIASILYYYFSMEAASLSLSNLWFGFLLGLLCFLDNSSFKNDVKEESTKYLLLTSIVLRILCSLVERISGYVRHRPTLLTTVEFLELVGFAIASTTMLVEKSLSVILLVVALAMLIIDLRMKSFLAIPNLVIFAVLLFFSSLETPKNPIAFACFFICLITDPFLDIYFSGLSVTERWKPFLYRGRICRRLSVVFAGMIELTFFILSAFKLRDTHLWYFVIPGFSIFGIFWMICHIIFLLTLWGFHTKLNDCHKVYFTHRTDYNSLDRIMASKGMRHFCLISEQLVFFSLLATAILGAVSWQPTNGIFLSMFLIVLPLESMAHGLFHELGNCLGGTSVGYAIVIPTNFCSPDGQPTLLPPEHVQELNLRSTGMLNAIQRFFAYHMIETYGCDYSTSGLSFDTLHSKLKAFLELRTVDGPRHDTYILYYSGHTHGTGEWALAGGDTLRLDTLIEWWREKNGSFCSRLIIVLDSENSTPWVKEVRKINDQYIAVQGAELIKTVDIEEADPPQLGDFTKDWVEYNCNSSNNICWTEKGRTVKAVYGVSKRWSDYTLHLPTGSDVAKHWMLHFPRITYPLVHLANWLCGLNLFWICKTCFRCLKRLKMSWFLPTVLDTGQGFKLVKS

SEQ ID NO: 78 - DNA, 3008 bp, Homo sapiens
  CDS (372)..(2462)
cgtaccgtcgcggatttcggcggcggaaacatggcggtcgcggccgggccggtaacggagaaagtttacgccgacactggcctgtattagcgcgtatggcctcgggccctcgttccccaaggcgtgccgcctccctgttctcagtcgcaggctgaagccttgtctgctctcctcctttttggtttggttttggaactgactccgagggttgggagagcgcgttggtggcgacggccgagtcagatcactataaacaaaatttccacaagagaaaatgttgaaataggagttgcggatacattggatatactggatgaaatacaagcggttaatttttgtaacgtgagggaaaagcccacattgctggttacatgtgtaaatcactgcgttattgctttagtcattgtctctatttagcaatgacaagactggaagaagtaaatagagaagtgaacatgcattcttcagtgcggtatcttggctatttagccagaatcaatttattggttgctatatgcttaggtctatacgtaagatgggaaaaaacagcaaattccttaattttggtaatttttattcttggtctttttgttcttggaatcgccagcatactctattactatttttcaatggaagcagcaagtttaagtctctccaatctttggtttggattcttgcttggcctcctatgttttcttgataattcatcctttaaaaatgatgtaaaagaagaatcaaccaaatatttgcttctaacatccatagtgttaaggatattgtgctctctggtggagagaatttctggttatgtccgtcatcggcccactttactaaccacagttgaatttctggagcttgttggatttgccattgccagcacaactatgttggtggagaagtctctgagtgtcattttgcttgttgtagctctggctatgctgattattgatctgagaatgaaatctttcttagctattccaaacttagttatttttgcagttttgttatttttttcctcattggaaactcccaaaaatccgattgcttttgcgtgtttttttatttgcctgataactgatcctttccttgacatttattttagtggactttcagtaactgaaagatggaaaccctttttgtaccgtggaagaatttgcagaagactttcagtcgtttttgctggaatgattgagcttacattttttattctttccgcattcaaacttagagacactcacctctggtattttgtaatacctggcttttccatttttggaattttctggatgatttgtcatattatttttcttttaactctttggggattccataccaaattaaatgactgccataaagtatattttactcacaggacagattacaatagccttgatagaatcatggcatccaaagggatgcgccatttttgcttgatttcagagcagttggtgttctttagtcttcttgcaacagcgattttgggagcagtttcctggcagccaacaaatggaattttcttgagcatgtttctaatcgttttgccattggaatccatggctcatgggctcttccatgaattgggtaactgtttaggaggaacatctgttggatatgctattgtgattcccaccaacttctgcagtcctgatggtcagccaacactgcttcccccagaacatgtacaggagttaaatttgaggtctactggcatgctcaatgctatccaaagattttttgcatatcatatgattgagacctatggatgtgactattccacaagtggactgtcatttgatactctgcattccaaactaaaagctttcctcgaacttcggacagtggatggacccagacatgatacgtatattttgtattacagtgggcacacccatggtacaggagagtgggctctagcaggtggagatacactacgccttgacacacttatagaatggtggagagaaaagaatggttccttttgttcccggcttattatcgtattagacagcgaaaattcaaccccttgggtgaaagaagtgaggaaaattaatgaccagtatattgcagtgcaaggagcagagttgataaaaacagtagatattgaagaagctgacccgccacagctaggtgactttacaaaagactgggtagaatataactgcaactccagtaataacatctgctggactgaaaagggacgcacagtgaaagcagtatatggtgtgtcaaaacggtggagtgactacactctgcatttgccaacgggaagcgatgtggccaagcactggatgttacactttcctcgtattacatatcccctagtgcatttggcaaattggttatgcggtctgaaccttttttggatctgcaaaacttgttttaggtgcttgaaaagattaaaaatgagttggtttcttcctactgtgctggacacaggacaaggcttcaaacttgtcaaatcttaatttggaccccaaagcgggatattaataagcactcatactaccaattatcactaacttgccattttttgtatgctgtatttttatttgtggaaaataccttgctacttctgtagctgctctcactttgtcttttcttaagtaattatggtatatataaggcgttgggaaaaaacattttataatgaaagtatgtagggagtcaaatgcttactgtaaatgcataagagacgttaaaaataacactgcactttcaggaatgtttgcttatggtcctgattagaaagaaacagttgtctatgctctgcaatggtcaatgatgaattactaatgccttattttctaggcatataataatagtttagagaatgtagaccagataaatttgtttactgttttaagaaaactaccagtttacttacagaagattcttttttccaaacagtaggtttcatccaagaccatttgaagaactgcaaactctttctcttagaaaagaaagagggcagcctaaaataaacgcaaaatttgcttatactccatcac

SEQ ID NO: 79 - protein, 611 aa, Homo sapiens [sequence omitted]

SEQ ID NO: 80 - DNA, 3007 bp, Homo sapiens
  CDS (629)..(2461)
cgtaccgtcgcggatttcggcggcggaaacatggcggtcgcggccgggccggtaacggagaaagtttacgccgacactggcctgtattagcgcgtatggcctcgggccctcgttccccaaggcgtgccgcctccctgttctcagtcgcaggctgaagccttgtctgctctcctcctttttggtttggttttggaactgactccgagggttgggagagcgcgttggtggcgacggccgagtcagatcactataaacaaaatttccacaagagaaaatgttgaaataggagttgcggatacattggatatactggatgaaatacaagcggttaatttttgtaacgtgagggaaaagcccacattgctggttacatgtgtaaatcactgcgttattgctttagtcattgtctctatttagcaatgacaagactggaagaagtaaatagagaagtgaacatgcattcttcagtgcggtatcttgctatttagccagaatcaatttattggttgctatatgcttaggtctatacgtaagatgggaaaaaacagcaaattccttaattttggtaatttttattcttggtctttttgttcttggaatcgccagcatactctattactatttttcaatggaagcagcaagtttaagtctctccaatctttggtttggattcttgcttggcctcctatgttttcttgataattcatcctttaaaaatgatgtaaaagaagaatcaaccaaatatttgcttctaacatccatagtgttaaggatattgtgctctctggtggagagaatttctggttatgtccgtcatcggcccactttactaaccacagttgaatttctggagcttgttggatttgccattgccagcacaactatgttggtggagaagtctctgagtgtcattttgcttgttgtagctctggctatgctgattattgatctgagaatgaaatctttcttagctattccaaacttagttatttttgcagttttgttatttttttcctcattggaaactcccaaaaatccgattgcttttgcgtgtttttttatttgcctgataactgatcctttccttgacatttattttagtggactttcagtaactgaaagatggaaaccctttttgtaccgtggaagaatttgcagaagactttcagtcgtttttgctggaatgattgagcttacattttttattctttccgcattcaaacttagagacactcacctctggtattttgtaatacctggcttttccatttttggaattttctggatgatttgtcatattatttttcttttaactctttggggattccataccaaattaaatgactgccataaagtatattttactcacaggacagattacaatagccttgatagaatcatggcatccaaagggatgcgccatttttgcttgatttcagagcagttggtgttctttagtcttcttgcaacagcgattttgggagcagtttcctggcagccaacaaatggaattttcttgagcatgtttctaatcgttttgccattggaatccatggctcatgggctcttccatgaattgggtaactgtttaggaggaacatctgttggatatgctattgtgattcccaccaacttctgcagtcctgatggtcagccaacactgcttcccccagaacatgtacaggagttaaatttgaggtctactggcatgctcaatgctatccaaagattttttgcatatcatatgattgagacctatggatgtgactattccacaagtggactgtcatttgatactctgcattccaaactaaaagctttcctcgaacttcggacagtggatggacccagacatgatacgtatattttgtattacagtgggcacacccatggtacaggagagtgggctctagcaggtggagatacactacgccttgacacacttatagaatggtggagagaaaagaatggttccttttgttcccggcttattatcgtattagacagcgaaaattcaaccccttgggtgaaagaagtgaggaaaattaatgaccagtatattgcagtgcaaggagcagagttgataaaaacagtagatattgaagaagctgacccgccacagctaggtgactttacaaaagactgggtagaatataactgcaactccagtaataacatctgctggactgaaaagggacgcacagtgaaagcagtatatggtgtgtcaaaacggtggagtgactacactctgcatttgccaacgggaagcgatgtggccaagcactggatgttacactttcctcgtattacatatcccctagtgcatttggcaaattggttatgcggtctgaaccttttttggatctgcaaaacttgttttaggtgcttgaaaagattaaaaatgagttggtttcttcctactgtgctggacacaggacaaggcttcaaacttgtcaaatcttaatttggaccccaaagcgggatattaataagcactcatactaccaattatcactaacttgccattttttgtatgctgtatttttatttgtggaaaataccttgctacttctgtagctgctctcactttgtcttttcttaagtaattatggtatatataaggcgttgggaaaaaacattttataatgaaagtatgtagggagtcaaatgcttactgtaaatgcataagagacgttaaaaataacactgcactttcaggaatgtttgcttatggtcctgattagaaagaaacagttgtctatgctctgcaatggtcaatgatgaattactaatgccttattttctaggcatataataatagtttagagaatgtagaccagataaatttgtttactgttttaagaaaactaccagtttacttacagaagattcttttttccaaacagtaggtttcatccaagaccatttgaagaactgcaaactctttctcttagaaaagaaagagggcagcctaaaataaacgcaaaatttgcttatactccatcac

SEQ ID NO: 81 - protein, 184 aa, Homo sapiens
MTSFEDADTEETVTCLQMTVYHPGQLQCGIFQSISFNREKLPSSEVVKFGRNSNICHYTFQDKQVSRVQFSLQLFKKFNSSVLSFEIKNMSKKTNLIVDSRELGYLNKMDLPYRCMVRFGEYQFLMEKEDGESLEFFETQFILSPRSLLQENNWPPHRPIPEYGTYSLCSSQSSSPTEMDENES

SEQ ID NO: 82 - DNA, 1617 bp, Homo sapiens
  CDS (285)..(836)
tttttacaaaggccccgggcgcgagaggacgtgctctgccagccagtgggaaggcaggccgcgcgcgcgggagcgcgggaggatcggcggctcgcggtcactggtccctggctcggttccccgcaccccggggctcacacttacccgcgcggaggagcagcggccgggtgtccacccccatcctgcgcccagtctcctcgattcccctcgctctgagccgggagagccgaacagctgaagagagttcactgactccccagccccaggtgggccttgtgcacatcatgaccagttttgaagatgctgacacagaagagacagtaacttgtctccagatgacggtttaccatcctggccagttgcagtgtggaatatttcagtcaataagttttaacagagagaaactcccttccagcgaagtggtgaaatttggccgaaattccaacatctgtcattatacttttcaggacaaacaggtttcccgagttcagttttctctgcagctgtttaaaaaattcaacagctcagttctctcctttgaaataaaaaatatgagtaaaaagaccaatctgatcgtggacagcagagagctgggctacctaaataaaatggacctgccatacaggtgcatggtcagattcggagagtatcagtttctgatggagaaggaagatggcgagtcattggaattttttgagactcaatttattttatctccaagatcactcttgcaagaaaacaactggccaccacacaggcccataccggagtatggcacttattcgctctgctcctcccaaagcagttctccgacagaaatggatgaaaatgagtcatgaacacagaaagtctaagaggagaaatatgatggatgaagagctctgtagatgctgtatagacactaaataagagttgattagggtagtatattatagtcatctgttatgctgtgaaatttggaattcagtattatcattttgaagtctgtaaattgtgttagtcattaacttagtcacctgttgtattctggatctacacaaaattattttaactgctcttattaatctgtgaggattaatatacaaaaagtatcctttgagatgaagtcgtgttctcaaaataaggttatattattttctttttctgcttgattttcatcttgtgttttgctttgtttttgtaaggaaccatctcttggtttggtcacatcagttcacaacagccatttgttttcaaggtcaaggctccaggcaggttgttactggtgtttgcagcctgtcagtacttgcagtactggaataggttctaggctagtgtctgcgcgtcactgtggttttagcatgggaggacttatttgagaaatactaccttacttttctatgatttctttttacagagttatagtgtgtttactcctaagatgacagttctctttgtctatattcagcatctaagacaaatatttaaacattttaaagaaccactgtgttaagtttaggattatttacttaccaaattagaagtttgacttttatgtgttatacacaatcttaaaatttcacgaattcacctttttaatagtatccatgtacataataaaatcaaagtttaattagc

SEQ ID NO: 83 - protein, 392 aa, Homo sapiens
MDARWWAVVVLAAFPSLGAGGETPEAPPESWTQLWFFRFVVNAAGYASFMVPGYLLVQYFRRKNYLETGRGLCFPLVKACVFGNEPKASDEVPLAPRTEAAETTPMWQALKLLFCATGLQVSYLTWGVLQERVMTRSYGATATSPGERFTDSQFLVLMNRVLALIVAGLSCVLCKQPRHGAPMYRYSFASLSNVLSSWCQYEALKFVSFPTQVLAKASKVIPVMLMGKLVSRRSYEHWEYLTATLISIGVSMFLLSSGPEPRSSPATTLSGLFTVGSLLEQGALLEGTRFMGRHSEFAAHALLLSICSACGQLFIFYTIGQFGAAVFTIIMTLRQAFAILLSCLLYGHTVTVVGGLGVAVVFAALLLRVYARGRLKQRGKKAVPVESPVQKV

SEQ ID NO: 84 - DNA, 1898 bp, Homo sapiens
  CDS (119)..(1294)
acttccgctggccgctggctcgctggccgctcctggaggcggcggcgggagcgcagggggcgcgcggcccggggactcgcattccccggttccccctccaccccacgcggcctggaccatggacgccagatggtgggcagtggtggtgctggctgcgttcccctccctaggggcaggtggggagactcccgaagcccctccggagtcatggacccagctatggttcttccgatttgtggtgaatgctgctggctatgccagctttatggtacctggctacctcctggtgcagtacttcaggcggaagaactacctggagaccggtaggggcctctgctttcccctggtgaaagcttgtgtgtttggcaatgagcccaaggcctctgatgaggttcccctggcgccccgaacagaggcggcagagaccaccccgatgtggcaggccctgaagctgctcttctgtgccacagggctccaggtgtcttatctgacttggggtgtgctgcaggaaagagtgatgacccgcagctatggggccacagccacatcaccgggtgagcgctttacggactcgcagttcctggtgctaatgaaccgagtgctggcactgattgtggctggcctctcctgtgttctctgcaagcagccccggcatggggcacccatgtaccggtactcctttgccagcctgtccaatgtgcttagcagctggtgccaatacgaagctcttaagttcgtcagcttccccacccaggtgctggccaaggcctctaaggtgatccctgtcatgctgatgggaaagcttgtgtctcggcgcagctacgaacactgggagtacctgacagccaccctcatctccattggggtcagcatgtttctgctatccagcggaccagagccccgcagctccccagccaccacactctcaggcctcttcacagtgggctcactgctagaacagggggccctactggagggaacccgcttcatggggcgacacagtgagtttgctgcccatgccctgctactctccatctgctccgcatgtggccagctcttcatcttttacaccattgggcagtttggggctgccgtcttcaccatcatcatgaccctccgccaggcctttgccatccttctttcctgccttctctatggccacactgtcactgtggtgggagggctgggggtggctgtggtctttgctgccctcctgctcagagtctacgcgcggggccgtctaaagcaacggggaaagaaggctgtgcctgttgagtctcctgtgcagaaggtttgagggtggaaagggcctgaggggtgaagtgaaataggaccctcccaccatccccttctgctgtaacctctgagggagctggctgaaagggcaaaatgcaggtgttttctcagtatcacagaccagctctgcagcaggggattggggagcccaggaggcagccttcccttttgccttaagtcacccatcttccagtaagcagtttattctgagccccgggggtagacagtcctcagtgaggggttttggggagtttggggtcaagagagcataggtaggttccacagttactcttcccacaagttcccttaagtcttgccctagctgtgctctgccaccttccagactcactcccctctgcaaatacctgcatttcttaccctggtgagaaaagcacaagcggtgtaggctccaatgctgctttcccaggagggtgaagatggtgctgtgctgaggaaaggggatgcagagccctgcccagcaccaccacctcctatgctcctggatccctaggctctgttccatgagcctgttgcaggttttggtactttagaaatgtaactttttgctcttataattttattttattaaattaaattactgc

SEQ ID NO: 85 - protein, 432 aa, Homo sapiens
MDARWWAVVVLAAFPSLGAGGETPEAPPESWTQLWFFRFVVNAAGYASFMVPGYLLVQYFRRKNYLETGRGLCFPLVKACVFGNEPKASDEVPLAPRTEAAETTPMWQALKLLFCATGLQVSYLTWGVLQERVMTRSYGATATSPGERFTDSQFLVLMNRVLALIVAGLSCVLCKQPRHGAPMYRYSFASLSNVLSSWCQYEALKFVSFPTQVLAKASKVIPVMLMGKLVSRRSYEHWEYLTATLISIGVSMFLLSSGPEPRSSPATTLSGLILLAGYIAFDSFTSNWQDALFAYKMSSVQMMFGVNFFSCLFTVGSLLEQGALLEGTRFMGRHSEFAAHALLLSICSACGQLFIFYTIGQFGAAVFTIIMTLRQAFAILLSCLLYGHTVTVVGGLGVAVVFAALLLRVYARGRLKQRGKKAVPVESPVQKV

SEQ ID NO: 86 - DNA, 2018 bp, Homo sapiens
  CDS (119)..(1414)
acttccgctggccgctggctcgctggccgctcctggaggcggcggcgggagcgcagggggcgcgcggcccggggactcgcattccccggttccccctccaccccacgcggcctggaccatggacgccagatggtgggcagtggtggtgctggctgcgttcccctccctaggggcaggtggggagactcccgaagcccctccggagtcatggacccagctatggttcttccgatttgtggtgaatgctgctggctatgccagctttatggtacctggctacctcctggtgcagtacttcaggcggaagaactacctggagaccggtaggggcctctgctttcccctggtgaaagcttgtgtgtttggcaatgagcccaaggcctctgatgaggttcccctggcgccccgaacagaggcggcagagaccaccccgatgtggcaggccctgaagctgctcttctgtgccacagggctccaggtgtcttatctgacttggggtgtgctgcaggaaagagtgatgacccgcagctatggggccacagccacatcaccgggtgagcgctttacggactcgcagttcctggtgctaatgaaccgagtgctggcactgattgtggctggcctctcctgtgttctctgcaagcagccccggcatggggcacccatgtaccggtactcctttgccagcctgtccaatgtgcttagcagctggtgccaatacgaagctcttaagttcgtcagcttccccacccaggtgctggccaaggcctctaaggtgatccctgtcatgctgatgggaaagcttgtgtctcggcgcagctacgaacactgggagtacctgacagccaccctcatctccattggggtcagcatgtttctgctatccagcggaccagagccccgcagctccccagccaccacactctcaggcctcatcttactggcaggttatattgcttttgacagcttcacctcaaactggcaggatgccctgtttgcctataagatgtcatcggtgcagatgatgtttggggtcaatttcttctcctgcctcttcacagtgggctcactgctagaacagggggccctactggagggaacccgcttcatggggcgacacagtgagtttgctgcccatgccctgctactctccatctgctccgcatgtggccagctcttcatcttttacaccattgggcagtttggggctgccgtcttcaccatcatcatgaccctccgccaggcctttgccatccttctttcctgccttctctatggccacactgtcactgtggtgggagggctgggggtggctgtggtctttgctgccctcctgctcagagtctacgcgcggggccgtctaaagcaacggggaaagaaggctgtgcctgttgagtctcctgtgcagaaggtttgagggtggaaagggcctgaggggtgaagtgaaataggaccctcccaccatccccttctgctgtaacctctgagggagctggctgaaagggcaaaatgcaggtgttttctcagtatcacagaccagctctgcagcaggggattggggagcccaggaggcagccttcccttttgccttaagtcacccatcttccagtaagcagtttattctgagccccgggggtagacagtcctcagtgaggggttttggggagtttggggtcaagagagcataggtaggttccacagttactcttcccacaagttcccttaagtcttgccctagctgtgctctgccaccttccagactcactcccctctgcaaatacctgcatttcttaccctggtgagaaaagcacaagcggtgtaggctccaatgctgctttcccaggagggtgaagatggtgctgtgctgaggaaaggggatgcagagccctgcccagcaccaccacctcctatgctcctggatccctaggctctgttccatgagcctgttgcaggttttggtactttagaaatgtaactttttgctcttataattttattttattaaattaaattactgc

SEQ ID NO: 87 - protein, 235 aa, Homo sapiens
MGIGKSKINSCPLSLSWGKRHSVDTSPGYHESDSKKSEDLSLCNVAEHSNTTEGPTGKQEGAQSVEEMFEEEAEEEVFLKFVILHAEDDTDEALRVQNLLQDDFGIKPGIIFAEMPCGRQHLQNLDDAVNGSAWTILLLTENFLRDTWCNFQFYTSLMNSVNRQHKYNSVIPMRPLNNPLPRERTPFALQTINALEEESRGFPTQVERIFQESVYKTQQTIWKETRNMVQRQFIA

SEQ ID NO: 88 - DNA, 2717 bp, Homo sapiens
  CDS (111)..(815)
aaaaggaagacagaaaagccgcgggctgactgtggtggcgctcgcctgcagattgaaaagaaatgctgagaaatacataaagttttcctcttctgccttggatatttataatgggtatcgggaagtctaaaataaattcctgccctctttctctctcttggggtaaaaggcacagtgtggatacaagtccaggatatcatgagtcagattccaagaagtctgaagatctatccttgtgtaatgttgctgagcacagcaatacaacagaggggccaacaggaaagcaggagggagctcagagcgtggaagagatgtttgaagaagaagctgaagaagaggtgttcctcaaatttgtgatattgcatgcagaagatgacacagatgaagccctcagagtccagaatctgctacaagatgactttggtatcaaacccggaataatctttgctgagatgccatgtggcagacagcatttacagaatttagatgatgctgtaaatgggtctgcatggacaatcttattactgactgaaaactttttaagagatacttggtgtaatttccagttctatacgtccctaatgaactccgttaacaggcagcataaatacaactctgttatacccatgcggcccctgaacaatccccttccccgagaaaggactccctttgccctccaaaccatcaatgccttagaggaagaaagtcgtggatttcctacacaagtagaaagaatttttcaggagtctgtgtataagacacaacaaactatatggaaagagacaagaaatatggtacaaagacaatttattgcctgagatgaaacatataacatgtggctggctcttgttttgtaaaccaaatgattaatcttcacttgagaaagcagtttctaggaaatgtttaaataaaagagagtcttcaccttaaagaaacctatggagcacaagaaagataaatttctgcaggacagcctataaaattgtggtactttttgatgtttcagtaaacttgacattgtcagagtttcaaggacttttctttcacaattttcctagttcatggatatgaaaaaggaattctcaatccatattccttgtattgaaccttgaacaaaaacttgtatgacagacatttttaaaaatgtgacaacacttttattctctgaattttgatctcaaaggacacagaaaaaaaatggccccaggagatctgatcacacttcctcctgaggcacctctcatggatgttgcaataagcattcgggtactatcacccagaaatatgaattgccagaatagaacatttagcatgttaagcgttgatgcatataaaatcagaaatagatgtgagaatggtggaactttttaaaagaacccagtcaaatgtattttctgctgaaatctgcatatttggaggcatttcccaccaccgattcacagcccatttgatagtgtggtagttagggacttcgtggagtggtgttcagacgtcccctggggcttaaatctcttcatattagtcatcatttgtaactatggctttatttgcagagcttctaaaaggcgtataactgtgtgagtggccagatattcactttttagatcaaaaacctctcttatggaagctttaaaagtttccgtcacacacaattctcttctcaggaagtatttctcatttaggtcttcaaagtagcctgactgtgtgcatgtgtgtgtgtgataggttatttataaagactttggatagaaggagatgtattttattacctcctattctagagccccatgctcctaacaagccagagaggccccaaacaggattgtttctttcctccacagcccttctgcccatctgagattgagggagcatcgtccacttgagatcagggatggggtggagaatgggtcatgtcatgtaatgagaaaagccctcttcgggatcatgagacttggttctagtccaatttctgccactgaggatgaatgtaactgtgggcaaactatttaccctcctttatctgtgaaatgaaagggttgaattgatggatctctaaaggcttttgtcctctatgaggatgtgaaaaactagggaccacaaaagggaacaagcaaaaaagtttggattcgataaagtgatatgtaatagttgcagaaggctttatatatgcttataatgaaaagatattttttgtatattgacagcataatttatttttaatgctgtcattacacttaaagtcacaggaaaaaaatatacatgcttactcaggctttcttaaaaataaatttttatagagatccttgagtaaagacattttgcttaatttcttttttcttattccccacttgtatatcccctaccagtaccgggatctgcacacatctttttgcagttacctcttcatagccatgaaccaaaacgttctatgaggagcatgcaagtaagtcaagcctcctattctgttagtacttattagaggaggagatggttttcattgcatagtgacattttcttagccttaacgttctgatagtagcttactactcacttctctttttcagttttcataataagtattcatttttttgccataatgcttcctgtaaagccaattttatatactaataaaacatgaactgcccactcttcatgcctgccaaacttggggcaattgatgctaaatggtatttttaaaataaatgtttttattcttt

SEQ ID NO: 89 - protein, 245 aa, Homo sapiens
MASPSRRLQTKPVITCFKSVLLIYTFIFWITGVILLAVGIWGKVSLENYFSLLNEKATNVPFVLIATGTVIILLGTFGCFATCRASAWMLKLYAMFLTLVFLVELVAAIVGFVFRHEIKNSFKNNYEKALKQYNSTGDYRSHAVDKIQNTLHCCGVTDYRDWTDTNYYSEKGFPKSCCKLEDCTPQRDADKVNNEGCFIKVMTIIESEMGVVAGISFGVACFQLIGIFLAYCLSRAITNNQYEIV

SEQ ID NO: 90 - DNA, 1793 bp, Homo sapiens
  CDS (60)..(794)
gcgtctcgctctctgtgttccaatcgcccggtgcggtggtgcagggtctcgggctagtcatggcgtccccgtctcggagactgcagactaaaccagtcattacttgtttcaagagcgttctgctaatctacacttttattttctggatcactggcgttatccttcttgcagttggcatttggggcaaggtgagcctggagaattacttttctcttttaaatgagaaggccaccaatgtccccttcgtgctcattgctactggtaccgtcattattcttttgggcacctttggttgttttgctacctgccgagcttctgcatggatgctaaaactgtatgcaatgtttctgactctcgtttttttggtcgaactggtcgctgccatcgtaggatttgttttcagacatgagattaagaacagctttaagaataattatgagaaggctttgaagcagtataactctacaggagattatagaagccatgcagtagacaagatccaaaatacgttgcattgttgtggtgtcaccgattatagagattggacagatactaattattactcagaaaaaggatttcctaagagttgctgtaaacttgaagattgtactccacagagagatgcagacaaagtaaacaatgaaggttgttttataaaggtgatgaccattatagagtcagaaatgggagtcgttgcaggaatttcctttggagttgcttgcttccaactgattggaatctttctcgcctactgcctctctcgtgccataacaaataaccagtatgagatagtgtaacccaatgtatctgtgggcctattcctctctacctttaaggacatttagggtcccccctgtgaattagaaagttgcttggctggagaactgacaacactacttactgatagaccaaaaaactacaccagtaggttgattcaatcaagatgtatgtagacctaaaactacaccaataggctgattcaatcaagatccgtgctcgcagtgggctgattcaatcaagatgtatgtttgctatgttctaagtccaccttctatcccattcatgttagatcgttgaaaccctgtatccctctgaaacactggaagagctagtaaattgtaaatgaagtaatactgtgttcctcttgactgttatttttcttagtagggggcctttggaaggcactgtgaatttgctattttgatgtagtgttacaagatggaaaattgattcctctgactttgctattgatgtagtgtgatagaaaattcacccctctgaactggctccttcccagtcaaggttatctggtttgattgtataatttgcaccaagaagttaaaatgttttatgactctctgttctgctgacaggcagagagtcacattgtgtaatttaatttcagtcagtcaatagatggcatccctcatcagggttgccagatggtgataacagtgtaaggccttgggtctaaggcatccacgactggaagggactactgatgttctgtgatacatcaggtttcagcacacaacttacatttctttgcctccaaattgaggcatttattatgatgttcatactttccctcttgtttgaaagtttctaattattaaatggtgtcggaattgttgtattttccttaggaattcagtggaacttatcttcattaaatttagctggtaccaggttgatatgacttgtcaatattatggtcaactttaagtcttagttttcgtttgtgcctttgattaataagtataactcttatacaataaatactgctttcctct

SEQ ID NO: 91 - protein, 180 aa, Homo sapiens
MASTSYDYCRVPMEDGDKRCKLLLGIGILVLLIIVILGVPLIIFTIKANSEACRDGLRAVMECRNVTHLLQQELTEAQKGFQDVEAQAATCNHTVMALMASLDAEKAQGQKKVEELEGEITTLNHKLQDASAEVERLRRENQVLSVRIADKKYYPSSQDSSSAAAPQLLIVLLGLSALLQ

SEQ ID NO: 92 - DNA, 970 bp, Homo sapiens
  CDS (26)..(565)
tttttcagctaaaggggagatctggatggcatctacttcgtatgactattgcagagtgcccatggaagacggggataagcgctgtaagcttctgctggggataggaattctggtgctcctgatcatcgtgattctgggggtgcccttgattatcttcaccatcaaggccaacagcgaggcctgccgggacggccttcgggcagtgatggagtgtcgcaatgtcacccatctcctgcaacaagagctgaccgaggcccagaagggctttcaggatgtggaggcccaggctgccacctgcaaccacactgtgatggccctaatggcttccctggatgcagagaaggcccaaggacaaaagaaagtggaggagcttgagggagagatcactacattaaaccataagcttcaggacgcgtctgcagaggtggagcgactgagaagagaaaaccaggtcttaagcgtgagaatcgcggacaagaagtactaccccagctcccaggactccagctccgctgcggcgccccagctgctgattgtgctgctgggcctcagcgctctgctgcagtgagatcccaggaagctggcacatcttggaaggtccgtcctgctcggcttttcgcttgaacattcccttgatctcatcagttctgagcgggtcatggggcaacacggttagcggggagagcacggggtagccggagaagggcctctggagcaggtctggaggggccatggggcagtcctgggtgtggggacacagtcgggttgacccagggctgtctccctccagagcctccctccggacaatgagtcccccctcttgtctcccaccctgagattgggcatggggtgcggtgtggggggcatgtgctgcctgttgttatgggttttttttgcggggggggttgcttttttctggggtctttgagctccaaaaaataaacacttcctttgagggagagcacacctt

SEQ ID NO: 93 - protein, 331 aa, Homo sapiens
MDSEKKRFTEEATKYFRERVSPVHLQILLTNNEAWKRFVTAAELPRDEADALYEALKKLRTYAAIEDEYVQQKDEQFREWFLKEFPQVKRKIQESIEKLRALANGIEEVHRGCTISNVVSSSTGAASGIMSLAGLVLAPFTAGTSLALTAAGVGLGAASAVTGITTSIVEHSYTSSAEAEASRLTATSIDRLKVFKEVMRDITPNLLSLLNNYYEATQTIGSEIRAIRQARARARLPVTTWRISAGSGGQAERTIAGTTRAVSRGARILSATTSGIFLALDVVNLVYESKHLHEGAKSASAEELRRQAQELEENLMELTQIYQRLNPCHTH

SEQ ID NO: 94 - DNA, 2039 bp, Homo sapiens
  CDS (175)..(1167)
attatgcagatgcacggctggaggtgggatccacacagctcagaacagctggatcttgctcacactctttcaagagaagcttccttgggttaagaaaaaaaacgaacccttccagtcaggtcagtgactggagagctccaaggaaagtctctcagtgacctggctgctggcaccatggactcagaaaagaaacgctttactgaagaggccaccaaatacttccgggagagagtcagcccagtgcatctgcaaatcctgctgactaacaatgaagcctggaagagattcgtgactgcggctgaattgcccagggatgaggcagatgctctctacgaagctctgaagaagcttagaacatatgcagctattgaggacgaatatgtgcagcagaaagatgagcagtttagggaatggtttttgaaagagtttccccaagtcaagaggaagatccaggagtccatagaaaagcttcgtgcccttgcaaatggtattgaagaggtccacagaggctgcaccatctccaacgtggtgtccagctccactggcgctgcctctggcatcatgtcccttgctggtcttgttttggcaccatttacagcagggacgagtctggcccttactgcagctggggtagggctgggagcagcgtctgctgtgactgggatcaccaccagcatcgtggagcactcatacacatcatcagcagaagctgaagccagcaggctgactgcaaccagcattgaccgattgaaggtatttaaggaagttatgcgtgacatcacacccaacttactttcccttcttaataattattacgaagccacacaaaccattgggagtgaaatccgtgccatcaggcaagccagagccagggcccgactccctgtgaccacctggcgaatctcagctggaagtggtggtcaagcagagagaacgattgcaggcaccacccgggcagtgagcagaggagcccggatcctgagtgcgaccacttcaggcatcttccttgcactggatgtggtcaaccttgtatacgagtcaaagcacttgcatgagggggcaaagtctgcatctgctgaggagctgaggcggcaggctcaggagctggaggagaatctaatggagctcactcagatctatcagcgtctgaatccatgccatacccactgaccccagaccagtgcagccagcaggggaggtgagccatacacaggccacgacaaaatgcaggcattttattagggggataaagagggcaaggtaaagtttatggagctgagtgttagtgactttggcatttctgtagctgagcacagcaggggaggggttaatgcagatggcaagtgcaccaaggagaaggcaggaatgctggagcctggaataagggaggagaggggactggagagtgtggggaataggaagaagaaatttcctttagactaacgaatatattggggggaggaatagaggggaggtgtgcaggaaccagcaatgagaaggccaggaaaagaaagagctgaaaatgcagaaagccgaagagttagaacttttggatacagcagaagaaacagcggctccactaccgacctgcccccggttcgatgtccttccaagaatgaagtctttccctggtgatggtcccctgccctgtctttccagcatccactctgtcttgtcctcctggaagtgtatctcagtcagccagtggcttcttgatgatggcggtggaggtggtggttgtagtgtgatggatcccctttaggttatttaggggtatatgtcccctgcttgaaccctgaaggccaggtaatgagccatggccattgtccccagctgaggaccaggtgtctctaaaaacccaaacatcctggagagtatgcgagaacctaccaagaaaaacagtctcattactcatatacagcaggcaaagagacagaaaattaactgaaaagcagtttagagactgggggaggccggatctctagagccatcctgctgagtgccctgtgtgtaagtcctaataaactcacctactcacc

SEQ ID NO: 95 - protein, 407 aa, Homo sapiens
MELLEEDLTCPICCSLFDDPRVLPCSHNFCKKCLEGILEGSVRNSLWRPAPFKCPTCRKETSATGINSLQVNYSLKGIVEKYNKIKISPKMPVCKGHLGQPLNIFCLTDMQLICGICATRGEHTKHVFCSIEDAYAQERDAFESLFQSFETWRRGDALSRLDTLETSKRKSLQLLTKDSDKVKEFFEKLQHTLDQKKNEILSDFETMKLAVMQAYDPEINKLNTILQEQRMAFNIAEAFKDVSEPIVFLQQMQEFREKIKVIKETPLPPSNLPASPLMKNFDTSQWEDIKLVDVDKLSLPQDTGTFISKIPWSFYKLFLLILLLGLVIVFGPTMFLEWSLFDDLATWKGCLSNFSSYLTKTADFIEQSVFYWEQVTDGFFIFNERFKNFTLVVLNNVAEFVCKYKLL

SEQ ID NO: 96 - DNA, 1409 bp, Homo sapiens
  CDS (181)..(1401)
gctgtgcttggcgcgtaccgtgcggtccctgtagttggaggacgggcggtcgcgcggcctttcccactagccggagtagcctctagttcgttagtcaaaacgtgaaaaaaaaagacctgctttgccctgggaaatagtaaccctgccaaatacatcagcttgtaggagacagaggatgtgatggagctgcttgaagaagatctcacatgccctatttgttgtagtctgtttgatgatccacgggttttgccttgctcccacaacttctgcaaaaaatgcttagaaggtatcttagaagggagtgtgcggaattccttgtggagaccagctccattcaagtgtcctacatgccgtaaggaaacttcagctactggaattaatagcctgcaggttaattactccctgaagggtattgtggaaaagtataacaagatcaagatctctcccaaaatgccagtatgcaaaggacacttggggcagcctctcaacattttctgcctgactgatatgcagctgatttgtgggatctgtgctactcgtggggagcacaccaaacatgtcttctgttctattgaagatgcctatgctcaggaaagggatgcctttgagtccctcttccagagctttgagacctggcgtcggggagatgctctttctcgcttggataccttggaaactagtaagaggaaatccctacagttactgactaaagattcagataaagtgaaggaattttttgagaagttacaacacacactggatcaaaagaagaatgaaattctgtctgactttgagaccatgaaacttgctgttatgcaagcatatgacccagagatcaacaaactcaacaccatcttgcaggagcaacggatggcctttaacattgctgaggctttcaaagatgtgtcagaacccattgtatttctgcaacagatgcaggagtttagagagaaaatcaaagtaatcaaggaaactcctttacctccctctaatttgcctgcaagccctttaatgaagaactttgataccagtcagtgggaagacataaaactagtcgatgtggataaactttctttgcctcaagacactggcacattcattagcaagattccctggagcttttataagttatttttgctaatccttctgcttggccttgtcattgtctttggtcctaccatgttcctagaatggtcattatttgatgacctggcaacttggaaaggctgtctttcaaacttcagttcctatctgactaaaacagccgatttcatagaacaatcagttttttactgggaacaggtgacagatgggtttttcattttcaatgaaagattcaagaattttactttggtggtactgaacaatgtggcagaatttgtgtgcaaatataaactattataaaatcg

SEQ ID NO: 97 - protein, 465 aa, Homo sapiens
MASTTSTKKMMEEATCSICLSLMTNPVSINCGHSYCHLCITDFFKNPSQKQLRQETFCCPQCRAPFHMDSLRPNKQLGSLIEALKETDQEMSCEEHGEQFHLFCEDEGQLICWRCERAPQHKGHTTALVEDVCQGYKEKLQEAVTKLKQLEDRCTEQKLSTAMRITKWKEKVQIQRQKIRSDFKNLQCFLHEEEKSYLWRLEKEEQQTLSRLRDYEAGLGLKSNELKSHILELEEKCQGSAQKLLQNVNDTLSRSWAVKLETSEAVSLELHTMCNVSKLYFDVKKMLRSHQVSVTLDPDTAHHELILSEDRRQVTRGYTQENQDTSSRRFTAFPCVLGCEGFTSGRRYFEVDVGEGTGWDLGVCMENVQRGTGMKQEPQSGFWTLRLCKKKGYVALTSPPTSLHLHEQPLLVGIFLDYEAGVVSFYNGNTGCHIFTFPKASFSDTLRPYFQVYQYSPLFLPPPGD

SEQ ID NO: 98 - DNA, 1940 bp, Homo sapiens
  CDS (477)..(1871)
gttaacttcctgacccaggaagtggcagcaacagaggggactagcagcgaatatactttacaccaaatctcagaagattcagaacttagatgagtggggcccaggacaggaaccctggagccttggaaggaggggagccccatctccccagaagagcagtgaccccagcagagaggggcctggtgtatcactggaggaaatagcctgccaaggaatacacgtcttcagaagaagttctgtgtggcttcaagagactgatcaaattgtgagaggaaaacagcctacccggtcctcttttcttcaatacaaaatgagataataggggttggaaggaaaaccttcaagacctatggaagtcagttgcagccagctcatcacatagaggtgcaggtgaggtgtattttcatcacggtggaaaattctggctgcttcatctccatctctagagccaatattggagcttttcaataaaagctatggcctcaaccaccagcaccaagaagatgatggaggaagccacctgctccatctgcctgagcctgatgacgaacccagtaagcatcaactgtggacacagctactgccacttgtgtataacagacttctttaaaaacccaagccaaaagcaactgaggcaggagacattctgctgtccccagtgtcgggctccatttcatatggatagcctccgacccaacaagcagctgggaagcctcattgaagccctcaaagagacggatcaagaaatgtcatgtgaggaacacggagagcagttccacctgttctgcgaagacgaggggcagctcatctgctggcgctgtgagcgggcaccacagcacaaagggcacaccacagctcttgttgaagacgtatgccagggctacaaggaaaagctccaggaagctgtgacaaaactgaagcaacttgaagacagatgtacggagcagaagctgtccacagcaatgcgaataactaaatggaaagagaaggtacagattcagagacaaaaaatccggtctgactttaagaatctccagtgtttcctacatgaggaagagaagtcttatctctggaggctggagaaagaagaacaacagactctgagtagactgagggactatgaggctggtctggggctgaagagcaatgaactcaagagccacatcctggaactggaggaaaaatgtcagggctcagcccagaaattgctgcagaatgtgaatgacactttgagcaggagttgggctgtgaagctggaaacatcagaggctgtctccttggaacttcatactatgtgcaatgtttccaagctttacttcgatgtgaagaaaatgttaaggagtcatcaagttagtgtgactctggatccagatacagctcatcacgaactaattctctctgaggatcggagacaagtgactcgtggatacacccaggagaatcaggacacatcttccaggagatttactgccttcccctgtgtcttgggttgtgaaggcttcacctcaggaagacgttactttgaagtggatgttggcgaaggaaccggatgggatttaggagtttgtatggaaaatgtgcagaggggcactggcatgaagcaagagcctcagtctggattctggaccctcaggctgtgcaaaaagaaaggctatgtagcacttacttctcccccaacttcccttcatctgcatgagcagcccctgcttgtgggaatttttctggactatgaggccggagttgtatccttttataacgggaatactggctgccacatctttactttcccgaaggcttccttctctgatactctccggccctatttccaggtttatcaatattctcctttgtttctgcctcccccaggtgactaaggaaaagagcagaagctccttggtttaaccagcacagagaaaataatataaatcccataagggcag

SEQ ID NO: 99 - protein, 465 aa, Homo sapiens
MASTTSTKKMMEEATCSICLSLMTNPVSINCGHSYCHLCITDFFKNPSQKQLRQETFCCPQCRAPFHMDSLRPNKQLGSLIEALKETDQEMSCEEHGEQFHLFCEDEGQLICWRCERAPQHKGHTTALVEDVCQGYKEKLQKAVTKLKQLEDRCTEQKLSTAMRITKWKEKVQIQRQKIRSDFKNLQCFLHEEEKSYLWRLEKEEQQTLSRLRDYEAGLGLKSNELKSHILELEEKCQGSAQKLLQNVNDTLSRSWAVKLETSEAVSLELHTMCNVSKLYFDVKKMLRSHQVSVTLDPDTAHHELILSEDRRQVTRGYTQENQDTSSRRFTAFPCVLGCEGFTSGRRYFEVDVGEGTGWDLGVCMENVQRGTGMKQEPQSGFWTLRLCKKKGYVALTSPPTSLHLHEQPLLVGIFLDYEAGVVSFYNGNTGCHIFTFPKASFSDTLRPYFQVYQYSPLFLPPPGD

SEQ ID NO: 100 - DNA, 1940 bp, Homo sapiens
  CDS (477)..(1871)
gttaacttcctgacccaggaagtggcagcaacagaggggactagcagcgaatatactttacaccaaatctcagaagattcagaacttagatgagtggggcccaggacaggaaccctggagccttggaaggaggggagccccatctccccagaagagcagtgaccccagcagagaggggcctggtgtatcactggaggaaatagcctgccaaggaatacacgtcttcagaagaagttctgtgtggcttcaagagactgatcaaattgtgagaggaaaacagcctacccggtcctcttttcttcaatacaaaatgagataataggggttggaaggaaaaccttcaagacctatggaagtcagttgcagccagctcatcacatagaggtgcaggtgaggtgtattttcatcacggtggaaaattctggctgcttcatctccatctctagagccaatattggagcttttcaataaaagctatggcctcaaccaccagcaccaagaagatgatggaggaagccacctgctccatctgcctgagcctgatgacgaacccagtaagcatcaactgtggacacagctactgccacttgtgtataacagacttctttaaaaacccaagccaaaagcaactgaggcaggagacattctgctgtccccagtgtcgggctccatttcatatggatagcctccgacccaacaagcagctgggaagcctcattgaagccctcaaagagacggatcaagaaatgtcatgtgaggaacacggagagcagttccacctgttctgcgaagacgaggggcagctcatctgctggcgctgtgagcgggcaccacagcacaaagggcacaccacagctcttgttgaagacgtatgccagggctacaaggaaaagctccagaaagctgtgacaaaactgaagcaacttgaagacagatgtacggagcagaagctgtccacagcaatgcgaataactaaatggaaagagaaggtacagattcagagacaaaaaatccggtctgactttaagaatctccagtgtttcctacatgaggaagagaagtcttatctctggaggctggagaaagaagaacaacagactctgagtagactgagggactatgaggctggtctggggctgaagagcaatgaactcaagagccacatcctggaactggaggaaaaatgtcagggctcagcccagaaattgctgcagaatgtgaatgacactttgagcaggagttgggctgtgaagctggaaacatcagaggctgtctccttggaacttcatactatgtgcaatgtttccaagctttacttcgatgtgaagaaaatgttaaggagtcatcaagttagtgtgactctggatccagatacagctcatcacgaactaattctctctgaggatcggagacaagtgactcgtggatacacccaggagaatcaggacacatcttccaggagatttactgccttcccctgtgtcttgggttgtgaaggcttcacctcaggaagacgttactttgaagtggatgttggcgaaggaaccggatgggatttaggagtttgtatggaaaatgtgcagaggggcactggcatgaagcaagagcctcagtctggattctggaccctcaggctgtgcaaaaagaaaggctatgtagcacttacttctcccccaacttcccttcatctgcatgagcagcccctgcttgtgggaatttttctggactatgaggccggagttgtatccttttataacgggaatactggctgccacatctttactttcccgaaggcttccttctctgatactctccggccctatttccaggtttatcaatattctcctttgtttctgcctcccccaggtgactaaggaaaagagcagaagctccttggtttaaccagcacagagaaaataatataaatcccataagggcag

SEQ ID NO: 101 - protein, 685 aa, Homo sapiens
MELLRTITYQPAASTKMCEQALGKGCGADSKKKRPPQPPEESQPPQSQAQVPPAAPHHHHHHSHSGPEISRIIVDPTTGKRYCRGKVLGKGGFAKCYEMTDLTNNKVYAAKIIPHSRVAKPHQREKIDKEIELHRILHHKHVVQFYHYFEDKENIYILLEYCSRRSMAHILKARKVLTEPEVRYYLRQIVSGLKYLHEQEILHRDLKLGNFFINEAMELKVGDFGLAARLEPLEHRRRTICGTPNYLSPEVLNKQGHGCESDIWALGCVMYTMLLGRPPFETTNLKETYRCIREARYTMPSSLLAPAKHLIASMLSKNPEDRPSLDDIIRHDFFLQGFTPDRLSSSCCHTVPDFHLSSPAKNFFKKAAAALFGGKKDKARYIDTHNRVSKEDEDIYKLRHDLKKTSITQQPSKHRTDEELQPPTTTVARSGTPAVENKQQIGDAIRMIVRGTLGSCSSSSECLEDSTMGSVADTVARVLRGCLENMPEADCIPKEQLSTSFQWVTKWVDYSNKYGFGYQLSDHTVGVLFNNGAHMSLLPDKKTVHYYAELGQCSVFPATDAPEQFISQVTVLKYFSHYMEENLMDGGDLPSVTDIRRPRLYLLQWLKSDKALMMLFNDGTFQVNFYHDHTKIIICSQNEEYLLTYINEDRISTTFRLTTLLMSGCSSELKNRMEYALNMLLQRCN

SEQ ID NO: 102 - DNA, 2783 bp, Homo sapiens
  CDS (128)..(2182)
gcacaagtggaccggggtgttgggtgctagtcggcaccagaggcaagggtgcgaggaccacggccggctcggacgtgtgaccgcgcctagggggtggcagcgggcagtgcggggcggcaaggcgaccatggagcttttgcggactatcacctaccagccagccgccagcaccaaaatgtgcgagcaggcgctgggcaagggttgcggagcagactcgaagaagaagcggccgccgcagccccccgaggaatcgcagccacctcagtcccaggcgcaagtgcccccggcggcccctcaccaccatcaccaccattcgcactcggggccggagatctcgcggattatcgtcgaccccacgactgggaagcgctactgccggggcaaagtgctgggaaagggtggctttgcaaaatgttacgagatgacagatttgacaaataacaaagtctacgccgcaaaaattattcctcacagcagagtagctaaacctcatcaaagggaaaagattgacaaagaaatagagcttcacagaattcttcatcataagcatgtagtgcagttttaccactacttcgaggacaaagaaaacatttacattctcttggaatactgcagtagaaggtcaatggctcatattttgaaagcaagaaaggtgttgacagagccagaagttcgatactacctcaggcagattgtgtctggactgaaataccttcatgaacaagaaatcttgcacagagatctcaaactagggaacttttttattaatgaagccatggaactaaaagttggggacttcggtctggcagccaggctagaacccttggaacacagaaggagaacgatatgtggtaccccaaattatctctctcctgaagtcctcaacaaacaaggacatggctgtgaatcagacatttgggccctgggctgtgtaatgtatacaatgttactagggaggcccccatttgaaactacaaatctcaaagaaacttataggtgcataagggaagcaaggtatacaatgccgtcctcattgctggctcctgccaagcacttaattgctagtatgttgtccaaaaacccagaggatcgtcccagtttggatgacatcattcgacatgacttttttttgcagggcttcactccggacagactgtcttctagctgttgtcatacagttccagatttccacttatcaagcccagctaagaatttctttaagaaagcagctgctgctctttttggtggcaaaaaagacaaagcaagatatattgacacacataatagagtgtctaaagaagatgaagacatctacaagcttaggcatgatttgaaaaagacttcaataactcagcaacccagcaaacacaggacagatgaggagctccagccacctaccaccacagttgccaggtctggaacacccgcagtagaaaacaagcagcagattggggatgctattcggatgatagtcagagggactcttggcagctgtagcagcagcagtgaatgccttgaagacagtaccatgggaagtgttgcagacacagtggcaagggttcttcggggatgtctggaaaacatgccggaagctgattgcattcccaaagagcagctgagcacatcatttcagtgggtcaccaaatgggttgattactctaacaaatatggctttgggtaccagctctcagaccacaccgtcggtgtccttttcaacaatggtgctcacatgagcctccttccagacaaaaaaacagttcactattacgcagagcttggccaatgctcagttttcccagcaacagatgctcctgagcaatttattagtcaagtgacggtgctgaaatacttttctcattacatggaggagaacctcatggatggtggagatctgcctagtgttactgatattcgaagacctcggctctacctccttcagtggctaaaatctgataaggccctaatgatgctctttaatgatggcacctttcaggtgaatttctaccatgatcatacaaaaatcatcatctgtagccaaaatgaagaataccttctcacctacatcaatgaggataggatatctacaactttcaggctgacaactctgctgatgtctggctgttcatcagaattaaaaaatcgaatggaatatgccctgaacatgctcttacaaagatgtaactgaaagacttttcgaatggaccctatgggactcctcttttccactgtgagatctacagggaacccaaaagaatgatctagagtatgttgaagaagatggacatgtggtggtacgaaaacaattcccctgtggcctgctggactgggtggaaccagaacaggctaaggcatacagttcttgactttggacaatccaagagtgaaccagaatgcagttttccttgagatacctgttttaaaaggtttttcagacaattttgcagaaaggtgcattgattcttaaattctctctgttgagagcatttcagccagaggactttggaactgtgaatatacttcctgaaggggagggagaagggaggaagctcccatgttgtttaaaggctgtaattggagcagcttttggctgcgtaactgtgaactatggccatatataattttttttcattaatttttgaagatacttgtggctggaaaagtgcattccttgttaataaactttttatttattacagcccaaagagcagtatttattatcaaaatgtctttttttttatgttgaccattttaaaccgttggcaataaagagtatgaaaacgcag

SEQ ID NO: 103 - protein, 161 aa, Homo sapiens
MSVPGPYQAATGPSSAPSAPPSYEETVAVNSYYPTPPAPMPGPTTGLVTGPDGKGMNPPSYYTQPAPIPNNNPITVQTVYVQHPITFLDRPIQMCCPSCNKMIVSQLSYNAGALTWLSCGSLCLLGCIAGCCFIPFCVDALQDVDHYCPNCRALLGTYKRL

SEQ ID NO: 104 - DNA, 1589 bp, Homo sapiens
  CDS (70)..(552)
ccttttctcggggcgcccgaaggccagctcagacctcccggctcgacaggcggcgcgggcggcggtaaaatgtcggttccaggaccttaccaggcggccactgggccttcctcagcaccatccgcacctccatcctatgaagagacagtggctgttaacagttattaccccacacctccagctcccatgcctgggccaactacggggcttgtgacggggcctgatgggaagggcatgaatcctccttcgtattatacccagccagcgcccatccccaataacaatccaattaccgtgcagacggtctacgtgcagcaccccatcacctttttggaccgccctatccaaatgtgttgtccttcctgcaacaagatgatcgtgagtcagctgtcctataacgccggtgctctgacctggctgtcctgcgggagcctgtgcctgctggggtgcatagcgggctgctgcttcatccccttctgcgtggatgccctgcaggacgtggaccattactgtcccaactgcagagctctcctgggcacctacaagcgtttgtaggactcagccagacgtggagggagccgggtgccgcaggaagtcctttccacctctcatccagcttcacgcctggtggaggttctgccctggtggtctcacctctccagggggcccaccttcatgtcttcttttggggggaatacgtcgcaaaactaacaaatctccaaaccccagaaattgctgcttggagtcgtgcataggacttgcaaagacattccccttgagtgtcagttccacggtttcctgcctccctgagaccctgagtcctgccatctaactgtgatcattgccctatccgaatatcttcctgtgatctgccatcagtggctcttttttcctgcttccatgggcctttctggtggcagtctcaaactgagaagccacagttgccttatttttgaggctgttctgcccagagctcggctgaaccagcctttagtgcctaccattatcttatccgtctcttcccgtccctgatgacaaagatcttgccttacagactttacaggcttggctttgagattctgtaactgcagacttcattagcacacagattcactttaatttcttaattttttttttaaatacaaggagggggctattaacacccagtacagacatatccacaaggtcgtaaatgcatgctagaaaaatagggctggatcttatcactgccctgtctccccttgtttctctgtgccagatcttcagtgcccctttccatacagggatttttttctcatagagtaattatatgaacagtttttatgacctccttttggtctgaaatactttcgaacagaatttcttttttttaaaaaaaaacagagatggggtcttactatgttgcccaggctggtgtcgaactcctgggctcaagcgatccttctgccttggcctcccgaagtgctgggattgcaggcataagctaccatgctgggcctgaacataatttcaagaggaggatttataaaaccattttctgtaatcaaatgattggtgtcattttcccatttgccaatgtagtctcactt

SEQ ID NO: 105 - protein, 161 aa, Homo sapiens
MSVPGPYQAATGPSSAPSAPPSYEETVAVNSYYPTPPAPMPGPTTGLVTGPDGKGMNPPSYYTQPAPIPNNNPITVQTVYVQHPITFLDRPVQMCCPSCNKMIVSQLSYNAGALTWLSCGSLCLLGCIAGCCFIPFCVDALQDVDHYCPNCRALLGTYKRL

SEQ ID NO: 106 - DNA, 1589 bp, Homo sapiens
  CDS (70)..(552)
ccttttctcggggcgcccgaaggccagctcagacctcccggctcgacaggcggcgcgggcggcggtaaaatgtcggttccaggaccttaccaggcggccactgggccttcctcagcaccatccgcacctccatcctatgaagagacagtggctgttaacagttattaccccacacctccagctcccatgcctgggccaactacggggcttgtgacggggcctgatgggaagggcatgaatcctccttcgtattatacccagccagcgcccatccccaataacaatccaattaccgtgcagacggtctacgtgcagcaccccatcacctttttggaccgccctgtccaaatgtgttgtccttcctgcaacaagatgatcgtgagtcagctgtcctataacgccggtgctctgacctggctgtcctgcgggagcctgtgcctgctggggtgcatagcgggctgctgcttcatccccttctgcgtggatgccctgcaggacgtggaccattactgtcccaactgcagagctctcctgggcacctacaagcgtttgtaggactcagccagacgtggagggagccgggtgccgcaggaagtcctttccacctctcatccagcttcacgcctggtggaggttctgccctggtggtctcacctctccagggggcccaccttcatgtcttcttttggggggaatacgtcgcaaaactaacaaatctccaaaccccagaaattgctgcttggagtcgtgcataggacttgcaaagacattccccttgagtgtcagttccacggtttcctgcctccctgagaccctgagtcctgccatctaactgtgatcattgccctatccgaatatcttcctgtgatctgccatcagtggctcttttttcctgcttccatgggcctttctggtggcagtctcaaactgagaagccacagttgccttatttttgaggctgttctgcccagagctcggctgaaccagcctttagtgcctaccattatcttatccgtctcttcccgtccctgatgacaaagatcttgccttacagactttacaggcttggctttgagattctgtaactgcagacttcattagcacacagattcactttaatttcttaattttttttttaaatacaaggagggggctattaacacccagtacagacatatccacaaggtcgtaaatgcatgctagaaaaatagggctggatcttatcactgccctgtctccccttgtttctctgtgccagatcttcagtgcccctttccatacagggatttttttctcatagagtaattatatgaacagtttttatgacctccttttggtctgaaatactttcgaacagaatttcttttttttaaaaaaaaacagagatggggtcttactatgttgcccaggctggtgtcgaactcctgggctcaagcgatccttctgccttggcctcccgaagtgctgggattgcaggcataagctaccatgctgggcctgaacataatttcaagaggaggatttataaaaccattttctgtaatcaaatgattggtgtcattttcccatttgccaatgtagtctcactt

SEQ ID NO: 107 - protein, 249 aa, Homo sapiens
MASASGAMAKHEQILVLDPPTDLKFKGPFTDVVTTNLKLRNPSDRKVCFKVKTTAPRRYCVRPNSGIIDPGSTVTVSVMLQPFDYDPNEKSKHKFMVQTIFAPPNTSDMEAVWKEAKPDELMDSKLRCVFEMPNENDKLNDMEPSKAVPLNASKQDGPMPKPHSVSLNDTETRKLMEECKRLQGEMMKLSEENRHLRDEGLRLRKVAHSDKPGSTSTASFRDNVTSPLPSLLVVIAAIFIGFFLGKFIL

SEQ ID NO: 108 - DNA, 1595 bp, Homo sapiens
  CDS (232)..(978)
agtgcgcgtggccgtggcggctggtgtggggttgagtcagttgtgggacccggagctgctgacccagcgggtggcccaccgaaccggtgacacagcggcaggcgttagggctcgggagccgcgagcctggcctcgtcctagagctcggccgagccgtcgccgccgtcgtcccccgcccccagtcagcaaaccgccgccgcgggcgcgcccccgctctgcgctgtctctccgatggcgtccgcctcaggggccatggcgaagcacgagcagatcctggtcctcgatccgcccacagacctcaaattcaaaggccccttcacagatgtagtcactacaaatcttaaattgcgaaatccatcggatagaaaagtgtgtttcaaagtgaagactacagcacctcgccggtactgtgtgaggcccaacagtggaattattgacccagggtcaactgtgactgtttcagtaatgctacagccctttgactatgatccgaatgaaaagagtaaacacaagtttatggtacagacaatttttgctccaccaaacacttcagatatggaagctgtgtggaaagaggcaaaacctgatgaattaatggattccaaattgagatgcgtatttgaaatgcccaatgaaaatgataaattgaatgatatggaacctagcaaagctgttccactgaatgcatctaagcaagatggacctatgccaaaaccacacagtgtttcacttaatgataccgaaacaaggaaactaatggaagagtgtaaaagacttcagggagaaatgatgaagctatcagaagaaaatcggcacctgagagatgaaggtttaaggctcagaaaggtagcacattcggataaacctggatcaacctcaactgcatccttcagagataatgtcaccagtcctcttccttcacttcttgttgtaattgcagccattttcattggattctttctagggaaattcatcttgtagagtgaagcatgcagagtgctgtttctttttttttttttctcttgaccagaaaaagatttgtttacctaccatttcattggtagtatggcccacggtgaccatttttttgtgtgtacagcgtcatataggctttgcctttaatgatctcttacggttagaaaacacaataaaaacaaactgttcggctactggacaggttgtatattaccagatcatcactagcagatgtcagttgcacattgagtcctttatgaaattcataaataaagaattgttctttctttgtggttttaataagagttcaagaattgttcagagtcttgtaaatgttattttaataatccctttaaattttatctgttgctgttacctcttgaaatatgatttatttagattgctaatcccactcattcaggaaatgccaagaggtattccttggggaaatggtgcctcttacagtgtaaatttttcctcctttacctttgctaatatcatggcagaatttttcttatcccttgtgaggcagttgttgactgagtttttcatccttacaatcctgtcccatggtatttaacataaaaaaaaataaaactgttaacagattcttgctcgat

SEQ ID NO: 109 - protein, 540 aa, Homo sapiens
MGTTARAALVLTYLAVASAASEGGFTATGQRQLRPEHFQEVGYAAPPSPPLSRSLPMDHPDSSQHGPPFEGQSQVQPPPSQEATPLQQEKLLPAQLPAEKEVGPPLPQEAVPLQKELPSLQHPNEQKEGTPAPFGDQSHPEPESWNAAQHCQQDRSQGGWGHRLDGFPPGRPSPDNLNQICLPNRQHVVYGPWNLPQSSYSHLTRQGETLNFLEIGYSRCCHCRSHTNRLECAKLVWEEAMSRFCEAEFSVKTRPHWCCTRQGEARFSCFQEEAPQPHYQLRACPSHQPDISSGLELPFPPGVPTLDNIKNICHLRRFRSVPRNLPATDPLQRELLALIQLEREFQRCCRQGNNHTCTWKAWEDTLDKYCDREYAVKTHHHLCCRHPPSPTRDECFARRAPYPNYDRDILTIDIGRVTPNLMGHLCGNQRVLTKHKHIPGLIHNMTARCCDLPFPEQACCAEEEKLTFINDLCGPRRNIWRDPALCCYLSPGDEQVNCFNINYLRNVALVSGDTENAKGQGEQGSTGGTNISSTSEPKEE

SEQ ID NO: 110 - DNA, 1810 bp, Homo sapiens
  CDS (102)..(1721)
aaccgtaacagccaccagacaagcttcagtggccggcccttcacatccagacttgcctgagaggacccacctctgagtgtccagtggtcagttgccccaggatggggaccacagccagagcagccttggtcttgacctatttggctgttgcttctgctgcctctgagggaggcttcacggctacaggacagaggcagctgaggccagagcactttcaagaagttggctacgcagctcccccctccccacccctatcccgaagcctccccatggatcaccctgactcctctcagcatggccctccctttgagggacagagtcaagtgcagccccctccctctcaggaggccacccctctccaacaggaaaagctgctacctgcccaactccctgctgaaaaggaagtgggtccccctctccctcaggaagctgtccccctccaaaaagagctgccctctctccagcaccccaatgaacagaaggaaggaacgccagctccatttggggaccagagccatccagaacctgagtcctggaatgcagcccagcactgccaacaggaccggtcccaagggggctggggccaccggctggatggcttcccccctgggcggccttctccagacaatctgaaccaaatctgccttcctaaccgtcagcatgtggtatatggtccctggaacctaccacagtccagctactcccacctcactcgccagggtgagaccctcaatttcctggagattggatattcccgctgctgccactgccgcagccacacaaaccgcctagagtgtgccaaacttgtgtgggaggaagcaatgagccgattctgtgaggccgagttctcggtcaagacccgaccccactggtgctgcacgcggcagggggaggctcggttctcctgcttccaggaggaagctccccagccacactaccagctccgggcctgccccagccatcagcctgatatttcctcgggtcttgagctgcctttccctcctggggtgcccacattggacaatatcaagaacatctgccacctgaggcgcttccgctctgtgccacgcaacctgccagctactgaccccctacaaagggagctgctggcactgatccagctggagagggagttccagcgctgctgccgccaggggaacaatcacacctgtacatggaaggcctgggaggatacccttgacaaatactgtgaccgggagtatgctgtgaagacccaccaccacttgtgttgccgccaccctcccagccctactcgggatgagtgctttgcccgtcgggctccttaccccaactatgaccgggacatcttgaccattgacatcggtcgagtcacccccaacctcatgggccacctctgtggaaaccaaagagttctcaccaagcataaacatattcctgggctgatccacaacatgactgcccgctgctgtgacctgccatttccagaacaggcctgctgtgcagaggaggagaaattaaccttcatcaatgatctgtgtggtccccgacgtaacatctggcgagaccctgccctctgctgttacctgagtcctggggatgaacaggtcaactgcttcaacatcaattatctgaggaacgtggctctagtgtctggagacactgagaacgccaagggccagggggagcagggctcaactggaggaacaaatatcagctccacctctgagcccaaggaagaatgagtcaccccagagccctagagggtcagatggggggaaccccaccctgccccacccatctgaacactcattacactaaacacctcttg

SEQ ID NO: 111 - protein, 540 aa, Homo sapiens
MGTTARAALVLTYLAVASAASEGGFTATGQRQLRPEHFQEVGYAAPPSPPLSRSLPMDHPDSSQHGPPFEGQSQVQPPPSQEATPLQQEKLLPAQLPAEKEVGPPLPQEAVPLQKELPSLQHPNEQKEGTPAPFGDQSHPEPESWNAAQHCQQDRSQGGWGHRLDGFPPGRPSPDNLNQICLPNRQHVVYGPWNLPQSSYSHLTRQGETLNFLEIGYSRCCHCRSHTNRLECAKLVWEEAMSRFCEAEFSVKTRPHWCCTRQGEARFSCFQEEAPQPHYQLRACPSHQPDISSGLELPFPPGVPTLDNIKNICHLRRFRSVPRNLPATDPLQRELLALIQLEREFQRCCRQGNNHTCTWKAWEDTLDKYCDREYAVKTHHHLCCRHPPSPTRDECFARRAPYPNYDRDILTIDISRVTPNLMGHLCGNQRVLTKHKHIPGLIHNMTARCCDLPFPEQACCAEEEKLTFINDLCGPRRNIWRDPALCCYLSPGDEQVNCFNINYLRNVALVSGDTENAKGQGEQGSTGGTNISSTSEPKEE

SEQ ID NO: 112 - DNA, 1810 bp, Homo sapiens
  CDS (102)..(1721)
aaccgtaacagccaccagacaagcttcagtggccggcccttcacatccagacttgcctgagaggacccacctctgagtgtccagtggtcagttgccccaggatggggaccacagccagagcagccttggtcttgacctatttggctgttgcttctgctgcctctgagggaggcttcacggctacaggacagaggcagctgaggccagagcactttcaagaagttggctacgcagctcccccctccccacccctatcccgaagcctccccatggatcaccctgactcctctcagcatggccctccctttgagggacagagtcaagtgcagccccctccctctcaggaggccacccctctccaacaggaaaagctgctacctgcccaactccctgctgaaaaggaagtgggtccccctctccctcaggaagctgtccccctccaaaaagagctgccctctctccagcaccccaatgaacagaaggaaggaacgccagctccatttggggaccagagccatccagaacctgagtcctggaatgcagcccagcactgccaacaggaccggtcccaagggggctggggccaccggctggatggcttcccccctgggcggccttctccagacaatctgaaccaaatctgccttcctaaccgtcagcatgtggtatatggtccctggaacctaccacagtccagctactcccacctcactcgccagggtgagaccctcaatttcctggagattggatattcccgctgctgccactgccgcagccacacaaaccgcctagagtgtgccaaacttgtgtgggaggaagcaatgagccgattctgtgaggccgagttctcggtcaagacccgaccccactggtgctgcacgcggcagggggaggctcggttctcctgcttccaggaggaagctccccagccacactaccagctccgggcctgccccagccatcagcctgatatttcctcgggtcttgagctgcctttccctcctggggtgcccacattggacaatatcaagaacatctgccacctgaggcgcttccgctctgtgccacgcaacctgccagctactgaccccctacaaagggagctgctggcactgatccagctggagagggagttccagcgctgctgccgccaggggaacaatcacacctgtacatggaaggcctgggaggatacccttgacaaatactgtgaccgggagtatgctgtgaagacccaccaccacttgtgttgccgccaccctcccagccctactcgggatgagtgctttgcccgtcgggctccttaccccaactatgaccgggacatcttgaccattgacatcagtcgagtcacccccaacctcatgggccacctctgtggaaaccaaagagttctcaccaagcataaacatattcctgggctgatccacaacatgactgcccgctgctgtgacctgccatttccagaacaggcctgctgtgcagaggaggagaaattaaccttcatcaatgatctgtgtggtccccgacgtaacatctggcgagaccctgccctctgctgttacctgagtcctggggatgaacaggtcaactgcttcaacatcaattatctgaggaacgtggctctagtgtctggagacactgagaacgccaagggccagggggagcagggctcaactggaggaacaaatatcagctccacctctgagcccaaggaagaatgagtcaccccagagccctagagggtcagatggggggaaccccaccctgccccacccatctgaacactcattacactaaacacctcttg

SEQ ID NO: 113 - protein, 382 aa, Homo sapiens
MGDWSALGKLLDKVQAYSTAGGKVWLSVLFIFRILLLGTAVESAWGDEQSAFRCNTQQPGCENVCYDKSFPISHVRFWVLQIIFVSVPTLLYLAHVFYVMRKEEKLNKKEEELKVAQTDGVNVDMHLKQIEIKKFKYGIEEHGKVKMRGGLLRTYIISILFKSIFEVAFLLIQWYIYGFSLSAVYTCKRDPCPHQVDCFLSRPTEKTIFIIFMLVVSLVSLALNIIELFYVFFKGVKDRVKGKSDPYHATSGALSPAKDCGSQKYAYFNGCSSPTAPLSPMSPPGYKLVTGDRNNSSCRNYNKQASEQTWANYSAEQNRMGQAGSTISNSHAQPFDFPDDNQNSKKLAAGHELQPLAIVDQRPSSRASSRASSRPRPDDLEI

SEQ ID NO: 114 - DNA, 3074 bp, Homo sapiens
  CDS (201)..(1346)
aacttttacgaggtatcagcacttttctttcattagggggaaggcgtgaggaaagtaccaaacagcagcggagttttaaactttaaatagacaggtctgagtgcctgaacttgccttttcattttacttcatcctccaaggagttcaatcacttggcgtgacttcactacttttaagcaaaagagtggtgcccaggcaacatgggtgactggagcgccttaggcaaactccttgacaaggttcaagcctactcaactgctggagggaaggtgtggctgtcagtacttttcattttccgaatcctgctgctggggacagcggttgagtcagcctggggagatgagcagtctgcctttcgttgtaacactcagcaacctggttgtgaaaatgtctgctatgacaagtctttcccaatctctcatgtgcgcttctgggtcctgcagatcatatttgtgtctgtacccacactcttgtacctggctcatgtgttctatgtgatgcgaaaggaagagaaactgaacaagaaagaggaagaactcaaggttgcccaaactgatggtgtcaatgtggacatgcacttgaagcagattgagataaagaagttcaagtacggtattgaagagcatggtaaggtgaaaatgcgaggggggttgctgcgaacctacatcatcagtatcctcttcaagtctatctttgaggtggccttcttgctgatccagtggtacatctatggattcagcttgagtgctgtttacacttgcaaaagagatccctgcccacatcaggtggactgtttcctctctcgccccacggagaaaaccatcttcatcatcttcatgctggtggtgtccttggtgtccctggccttgaatatcattgaactcttctatgttttcttcaagggcgttaaggatcgggttaagggaaagagcgacccttaccatgcgaccagtggtgcgctgagccctgccaaagactgtgggtctcaaaaatatgcttatttcaatggctgctcctcaccaaccgctcccctctcgcctatgtctcctcctgggtacaagctggttactggcgacagaaacaattcttcttgccgcaattacaacaagcaagcaagtgagcaaacctgggctaattacagtgcagaacaaaatcgaatggggcaggcgggaagcaccatctctaactcccatgcacagccttttgatttccccgatgataaccagaattctaaaaaactagctgctggacatgaattacagccactagccattgtggaccagcgaccttcaagcagagccagcagtcgtgccagcagcagacctcggcctgatgacctggagatctagatacaggcttgaaagcatcaagattccactcaattgtggagaagaaaaaaggtgctgtagaaagtgcaccaggtgttaattttgatccggtggaggtggtactcaacagccttattcatgaggcttagaaaacacaaagacattagaatacctaggttcactgggggtgtatggggtagatgggtggagagggaggggataagagaggtgcatgttggtatttaaagtagtggattcaaagaacttagattataaataagagttccattaggtgatacatagataagggctttttctccccgcaaacacccctaagaatggttctgtgtatgtgaatgagcgggtggtaattgtggctaaatatttttgttttaccaagaaactgaaataattctggccaggaataaatacttcctgaacatcttaggtcttttcaacaagaaaaagacagaggattgtccttaagtccctgctaaaacattccattgttaaaatttgcactttgaaggtaagctttctaggcctgaccctccaggtgtcaatggacttgtgctactatatttttttattcttggtatcagtttaaaattcagacaaggcccacagaataagattttccatgcatttgcaaatacgtatattctttttccatccacttgcacaatatcattaccatcactttttcatcattcctcagctactactcacattcatttaatggtttctgtaaacatttttaagacagttgggatgtcacttaacattttttttttgagctaaagtcagggaatcaagccatgcttaatatttaacaatcacttatatgtgtgtcgaagagtttgttttgtttgtcatgtattggtacaagcagatacagtataaactcacaaacacagatttgaaaataatgcacatatggtgttcaaatttgaacctttctcatggatttttgtggtgtgggccaatatggtgtttacattatataattcctgctgtggcaagtaaagcacactttttttttctcctaaaatgtttttccctgtgtatcctattatggatactggttttgttaattatgattctttattttctctcctttttttaggatatagcagtaatgctattactgaaatgaatttcctttttctgaaatgtaatcattgatgcttgaatgatagaattttagtactgtaaacaggctttagtcattaatgtgagagacttagaaaaaaatgcttagagtggactattaaatgtgcctaaatgaattttgcagtaactggtattcttgggttttcctacttaatacacagtaattcagaacttgtattctattatgagtttagcagtcttttggagtgaccagcaactttgatgtttgcactaagattttatttggaatgcaagagaggttgaaagaggattcagtagtacacatacaactaatttatttgaactatatgttgaagacatctaccagtttctccaaatgccttttttaaaactcatcacagaagattggtgaaaatgctgagtatgacacttttcttcttgcatgcatgtcagctacataaacagttttgtacaatgaaaattactaatttgtttgacattccatgttaaactacggtcatgttcagcttcattgcatgtaatgtagacctagtccatcagatcatgtgttctggagagtgttctttattcaataaagttttaatttagtat

SEQ ID NO: 115 - protein, 382 aa, Homo sapiens
MGDWSALGKLLDKVQAYSTAGGKVWLSVLFIFRILLLGTAVESAWGDEQSAFRCNTQQPGCENVCYDKSFPISHVRFWVLQIIFVSVPTLLYLAHVFYVMRKEEKLNKKEEELKVAQTDGVNVDMHLKQIEIKKFKYGIEEHGKVKMRGGLLRTYIISILFKSIFEVAFLLIQWYIYGFSLSAVYTCKRDPCPHQVDCFLSRPTEKTIFIIFMLVVSLVSLALNIIELFYVFFKGVKDRVKGKSDPYHATSGALSPAKDCGSQKYAYFNGCSSPTAPLSPMSPPGYKLVTGDRNNSSCRNYNKQASEQNWANYSAEQNRMGQAGSTISNSHAQPFDFPDDNQNSKKLAAGHELQPLAIVDQRPSSRASSRASSRPRPDDLEI

SEQ ID NO: 116 - DNA, 3074 bp, Homo sapiens
  CDS (201)..(1346)
aacttttacgaggtatcagcacttttctttcattagggggaaggcgtgaggaaagtaccaaacagcagcggagttttaaactttaaatagacaggtctgagtgcctgaacttgccttttcattttacttcatcctccaaggagttcaatcacttggcgtgacttcactacttttaagcaaaagagtggtgcccaggcaacatgggtgactggagcgccttaggcaaactccttgacaaggttcaagcctactcaactgctggagggaaggtgtggctgtcagtacttttcattttccgaatcctgctgctggggacagcggttgagtcagcctggggagatgagcagtctgcctttcgttgtaacactcagcaacctggttgtgaaaatgtctgctatgacaagtctttcccaatctctcatgtgcgcttctgggtcctgcagatcatatttgtgtctgtacccacactcttgtacctggctcatgtgttctatgtgatgcgaaaggaagagaaactgaacaagaaagaggaagaactcaaggttgcccaaactgatggtgtcaatgtggacatgcacttgaagcagattgagataaagaagttcaagtacggtattgaagagcatggtaaggtgaaaatgcgaggggggttgctgcgaacctacatcatcagtatcctcttcaagtctatctttgaggtggccttcttgctgatccagtggtacatctatggattcagcttgagtgctgtttacacttgcaaaagagatccctgcccacatcaggtggactgtttcctctctcgccccacggagaaaaccatcttcatcatcttcatgctggtggtgtccttggtgtccctggccttgaatatcattgaactcttctatgttttcttcaagggcgttaaggatcgggttaagggaaagagcgacccttaccatgcgaccagtggtgcgctgagccctgccaaagactgtgggtctcaaaaatatgcttatttcaatggctgctcctcaccaaccgctcccctctcgcctatgtctcctcctgggtacaagctggttactggcgacagaaacaattcttcttgccgcaattacaacaagcaagcaagtgagcaaaactgggctaattacagtgcagaacaaaatcgaatggggcaggcgggaagcaccatctctaactcccatgcacagccttttgatttccccgatgataaccagaattctaaaaaactagctgctggacatgaattacagccactagccattgtggaccagcgaccttcaagcagagccagcagtcgtgccagcagcagacctcggcctgatgacctggagatctagatacaggcttgaaagcatcaagattccactcaattgtggagaagaaaaaaggtgctgtagaaagtgcaccaggtgttaattttgatccggtggaggtggtactcaacagccttattcatgaggcttagaaaacacaaagacattagaatacctaggttcactgggggtgtatggggtagatgggtggagagggaggggataagagaggtgcatgttggtatttaaagtagtggattcaaagaacttagattataaataagagttccattaggtgatacatagataagggctttttctccccgcaaacacccctaagaatggttctgtgtatgtgaatgagcgggtggtaattgtggctaaatatttttgttttaccaagaaactgaaataattctggccaggaataaatacttcctgaacatcttaggtcttttcaacaagaaaaagacagaggattgtccttaagtccctgctaaaacattccattgttaaaatttgcactttgaaggtaagctttctaggcctgaccctccaggtgtcaatggacttgtgctactatatttttttattcttggtatcagtttaaaattcagacaaggcccacagaataagattttccatgcatttgcaaatacgtatattctttttccatccacttgcacaatatcattaccatcactttttcatcattcctcagctactactcacattcatttaatggtttctgtaaacatttttaagacagttgggatgtcacttaacattttttttttgagctaaagtcagggaatcaagccatgcttaatatttaacaatcacttatatgtgtgtcgaagagtttgttttgtttgtcatgtattggtacaagcagatacagtataaactcacaaacacagatttgaaaataatgcacatatggtgttcaaatttgaacctttctcatggatttttgtggtgtgggccaatatggtgtttacattatataattcctgctgtggcaagtaaagcacactttttttttctcctaaaatgtttttccctgtgtatcctattatggatactggttttgttaattatgattctttattttctctcctttttttaggatatagcagtaatgctattactgaaatgaatttcctttttctgaaatgtaatcattgatgcttgaatgatagaattttagtactgtaaacaggctttagtcattaatgtgagagacttagaaaaaaatgcttagagtggactattaaatgtgcctaaatgaattttgcagtaactggtattcttgggttttcctacttaatacacagtaattcagaacttgtattctattatgagtttagcagtcttttggagtgaccagcaactttgatgtttgcactaagattttatttggaatgcaagagaggttgaaagaggattcagtagtacacatacaactaatttatttgaactatatgttgaagacatctaccagtttctccaaatgccttttttaaaactcatcacagaagattggtgaaaatgctgagtatgacacttttcttcttgcatgcatgtcagctacataaacagttttgtacaatgaaaattactaatttgtttgacattccatgttaaactacggtcatgttcagcttcattgcatgtaatgtagacctagtccatcagatcatgtgttctggagagtgttctttattcaataaagttttaatttagtat

SEQ ID NO: 117 - protein, 398 aa, Homo sapiens
MEGAALLRVSVLCIWMSALFLGVGVRAEEAGARVQQNVPSGTDTGDPQSKPLGDWAAGTMDPESSIFIEDAIKYFKEKVSTQNLLLLLTDNEAWNGFVAAAELPRNEADELRKALDNLARQMIMKDKNWHDKGQQYRNWFLKEFPRLKSKLEDNIRRLRALADGVQKVHKGTTIANVVSGSLSISSGILTLVGMGLAPFTEGGSLVLLEPGMELGITAALTGITSSTIDYGKKWWTQAQAHDLVIKSLDKLKEVKEFLGENISNFLSLAGNTYQLTRGIGKDIRALRRARANLQSVPHASASRPRVTEPISAESGEQVERVNEPSILEMSRGVKLTDVAPVSFFLVLDVVYLVYESKHLHEGAKSETAEELKKVAQELEEKLNILNNNYKILQADQEL

SEQ ID NO: 118 - DNA, 2054 bp, Homo sapiens
  CDS (76)..(1269)
cacacagctcagaacagctggatcttgctcagtctctgccaggggaagattccttggaggaggccctgcagcgacatggagggagctgctttgctgagagtctctgtcctctgcatctggatgagtgcacttttccttggtgtgggagtgagggcagaggaagctggagcgagggtgcaacaaaacgttccaagtgggacagatactggagatcctcaaagtaagcccctcggtgactgggctgctggcaccatggacccagagagcagtatctttattgaggatgccattaagtatttcaaggaaaaagtgagcacacagaatctgctactcctgctgactgataatgaggcctggaacggattcgtggctgctgctgaactgcccaggaatgaggcagatgagctccgtaaagctctggacaaccttgcaagacaaatgatcatgaaagacaaaaactggcacgataaaggccagcagtacagaaactggtttctgaaagagtttcctcggttgaaaagtaagcttgaggataacataagaaggctccgtgcccttgcagatggggttcagaaggtccacaaaggcaccaccatcgccaatgtggtgtctggctctctcagcatttcctctggcatcctgaccctcgtcggcatgggtctggcacccttcacagagggaggcagccttgtactcttggaacctgggatggagttgggaatcacagcagctttgaccgggattaccagcagtaccatagactacggaaagaagtggtggacacaagcccaagcccacgacctggtcatcaaaagccttgacaaattgaaggaggtgaaggagtttttgggtgagaacatatccaactttctttccttagctggcaatacttaccaactcacacgaggcattgggaaggacatccgtgccctcagacgagccagagccaatcttcagtcagtaccgcatgcctcagcctcacgcccccgggtcactgagccaatctcagctgaaagcggtgaacaggtggagagagttaatgaacccagcatcctggaaatgagcagaggagtcaagctcacggatgtggcccctgtaagcttctttcttgtgctggatgtagtctacctcgtgtacgaatcaaagcacttacatgagggggcaaagtcagagacagctgaggagctgaagaaggtggctcaggagctggaggagaagctaaacattctcaacaataattataagattctgcaggcggaccaagaactgtgaccacagggcagggcagccaccaggagagatatgcctggcaggggccaggacaaaatgcaaactttttttttttctgagacagagtcttgctctgtcgccaagttgcagtgagccgagatatcgccactgcactccagcctgggtgacagagcgagactccatctcaaaaaaaaaaaaaaaaagaatatattgacggaagaatagagaggaggcttgaaggaaccagcaatgagaaggccaggaaaagaaagagctgaaaatggagaaagcccaagagttagaacagttggatacaggagaagaaacagcggctccactacagacccagccccaggttcaatgtcctccgaagaatgaagtctttccctggtgatggtcccctgccctgtctttccagcatccactctcccttgtcctcctgggggcatatctcagtcaggcagcggcttcctgatgatggtcgttggggtggttgtcatgtgatgggtcccctccaggttactaaagggtgcatgtcccctgcttgaacactgaagggcaggtggtgagccatggccatggtccccagctgaggagcaggtgtccctgagaacccaaacttcccagagagtatgtgagaaccaaccaatgaaaacagtcccatcgctcttacccggtaagtaaacagtcagaaaattagcatgaaagcagtttagcattgggaggaagctcagatctctagagctgtcttgtccccgcccaggattgacctgtgtaagtcccaataaactcacctactcatc

SEQ ID NO: 119 - protein, 398 aa, Homo sapiens
MEGAALLRVSVLCIWMSALFLGVRVRAEEAGARVQQNVPSGTDTGDPQSKPLGDWAAGTMDPESSIFIEDAIKYFKEKVSTQNLLLLLTDNEAWNGFVAAAELPRNEADELRKALDNLARQMIMKDKNWHDKGQQYRNWFLKEFPRLKSKLEDNIRRLRALADGVQKVHKGTTIANVVSGSLSISSGILTLVGMGLAPFTEGGSLVLLEPGMELGITAALTGITSSTIDYGKKWWTQAQAHDLVIKSLDKLKEVKEFLGENISNFLSLAGNTYQLTRGIGKDIRALRRARANLQSVPHASASRPRVTEPISAESGEQVERVNEPSILEMSRGVKLTDVAPVSFFLVLDVVYLVYESKHLHEGAKSETAEELKKVAQELEEKLNILNNNYKILQADQEL

SEQ ID NO: 120 - DNA, 2054 bp, Homo sapiens
  CDS (76)..(1269)
cacacagctcagaacagctggatcttgctcagtctctgccaggggaagattccttggaggaggccctgcagcgacatggagggagctgctttgctgagagtctctgtcctctgcatctggatgagtgcacttttccttggtgtgagagtgagggcagaggaagctggagcgagggtgcaacaaaacgttccaagtgggacagatactggagatcctcaaagtaagcccctcggtgactgggctgctggcaccatggacccagagagcagtatctttattgaggatgccattaagtatttcaaggaaaaagtgagcacacagaatctgctactcctgctgactgataatgaggcctggaacggattcgtggctgctgctgaactgcccaggaatgaggcagatgagctccgtaaagctctggacaaccttgcaagacaaatgatcatgaaagacaaaaactggcacgataaaggccagcagtacagaaactggtttctgaaagagtttcctcggttgaaaagtaagcttgaggataacataagaaggctccgtgcccttgcagatggggttcagaaggtccacaaaggcaccaccatcgccaatgtggtgtctggctctctcagcatttcctctggcatcctgaccctcgtcggcatgggtctggcacccttcacagagggaggcagccttgtactcttggaacctgggatggagttgggaatcacagcagctttgaccgggattaccagcagtaccatagactacggaaagaagtggtggacacaagcccaagcccacgacctggtcatcaaaagccttgacaaattgaaggaggtgaaggagtttttgggtgagaacatatccaactttctttccttagctggcaatacttaccaactcacacgaggcattgggaaggacatccgtgccctcagacgagccagagccaatcttcagtcagtaccgcatgcctcagcctcacgcccccgggtcactgagccaatctcagctgaaagcggtgaacaggtggagagagttaatgaacccagcatcctggaaatgagcagaggagtcaagctcacggatgtggcccctgtaagcttctttcttgtgctggatgtagtctacctcgtgtacgaatcaaagcacttacatgagggggcaaagtcagagacagctgaggagctgaagaaggtggctcaggagctggaggagaagctaaacattctcaacaataattataagattctgcaggcggaccaagaactgtgaccacagggcagggcagccaccaggagagatatgcctggcaggggccaggacaaaatgcaaactttttttttttctgagacagagtcttgctctgtcgccaagttgcagtgagccgagatatcgccactgcactccagcctgggtgacagagcgagactccatctcaaaaaaaaaaaaaaaaagaatatattgacggaagaatagagaggaggcttgaaggaaccagcaatgagaaggccaggaaaagaaagagctgaaaatggagaaagcccaagagttagaacagttggatacaggagaagaaacagcggctccactacagacccagccccaggttcaatgtcctccgaagaatgaagtctttccctggtgatggtcccctgccctgtctttccagcatccactctcccttgtcctcctgggggcatatctcagtcaggcagcggcttcctgatgatggtcgttggggtggttgtcatgtgatgggtcccctccaggttactaaagggtgcatgtcccctgcttgaacactgaagggcaggtggtgagccatggccatggtccccagctgaggagcaggtgtccctgagaacccaaacttcccagagagtatgtgagaaccaaccaatgaaaacagtcccatcgctcttacccggtaagtaaacagtcagaaaattagcatgaaagcagtttagcattgggaggaagctcagatctctagagctgtcttgtccccgcccaggattgacctgtgtaagtcccaataaactcacctactcatc

SEQ ID NO: 121 - protein, 108 aa, Homo sapiens
MGVQVETISPGDGRTFPKRGQTCVVHYTGMLEDGKKFDSSRDRNKPFKFMLGKQEVIRGWEEGVAQMSVGQRAKLTISPDYAYGATGHPGIIPPHATLVFDVELLKLE

SEQ ID NO: 122 - DNA, 1546 bp, Homo sapiens
  CDS (89)..(412)
actaggcagagccgtggaaccgccgccaggtcgctgttggtccacgccgcccgtcgcgccgcccgcccgctcagcgtccgccgccgccatgggagtgcaggtggaaaccatctccccaggagacgggcgcaccttccccaagcgcggccagacctgcgtggtgcactacaccgggatgcttgaagatggaaagaaatttgattcctcccgggacagaaacaagccctttaagtttatgctaggcaagcaggaggtgatccgaggctgggaagaaggggttgcccagatgagtgtgggtcagagagccaaactgactatatctccagattatgcctatggtgccactgggcacccaggcatcatcccaccacatgccactctcgtcttcgatgtggagcttctaaaactggaatgacaggaatggcctcctcccttagctccctgttcttggatctgccatggagggatctggtgcctccagacatgtgcacatgaatccatatggagcttttcctgatgttccactccactttgtatagacatctgccctgactgaatgtgttctgtcactcagctttgcttccgacacctctgtttcctcttcccctttctcctcgtatgtgtgtttacctaaactatatgccataaacctcaagttactcattttattttgttttcattttggggtgaagattcagtttcagtcttttggatataggtttccaattaagtacatggtcaagtattaacagcacaagtggtaggttaacattagaataggaattggtgttggggggggggtttgcaagaatattttattttaattttttggatgaaatttttatctattatatattaaacattcttgctgctgcgctgcaaagccatagcagatttgaggcgctgttgaggactgaattactctccaagttgagagatgtctttgggttaaattaaaagccctacctaaaactgaggtggggatggggagagcctttgcctccaccattcccacccaccctccccttaaaccctctgcctttgaaagtagatcatgttcactgcaatgctggacactacaggtatctgtccctgggccagcagggacctctgaagccttctttgtggcctttttttttttttcatcctgtggtttttctaatggactttcaggaattttgtaatctcataactttccaagctccaccacttcctaaatcttaagaactttaattgacagtttcaattgaaggtgctgtttgtagacttaacacccagtgaaagcccagccatcatgacaaatccttgaatgttctcttaagaaaatgatgctggtcatcgcagcttcagcatctcctgttttttgatgcttggctccctctgctgatctcagtttcctggcttttcctccctcagccccttctcacccctttgctgtcctgtgtagtgatttggtgagaaatcgttgctgcacccttcccccagcaccatttatgagtctcaagttttattattgcaataaaagtgctttatgccggcttttctc

SEQ ID NO: 123 - protein, 679 aa, Homo sapiens
MATLITSTTAATAASGPLVDYLWMLILGFIIAFVLAFSVGANDVANSFGTAVGSGVVTLKQACILASIFETVGSVLLGAKVSETIRKGLIDVEMYNSTQGLLMAGSVSAMFGSAVWQLVASFLKLPISGTHCIVGATIGFSLVAKGQEGVKWSELIKIVMSWFVSPLLSGIMSGILFFLVRAFILHKADPVPNGLRALPVFYACTVGINLFSIMYTGAPLLGFDKLPLWGTILISVGCAVFCALIVWFFVCPRMKRKIEREIKCSPSESPLMEKKNSLKEDHEETKLSVGDIENKHPVSEVGPATVPLQAVVEERTVSFKLGDLEEAPERERLPSVDLKEETSIDSTVNGAVQLPNGNLVQFSQAVSNQINSSGHYQYHTVHKDSGLYKELLHKLHLAKVGDCMGDSGDKPLRRNNSYTSYTMAICGMPLDSFRAKEGEQKGEEMEKLTWPNADSKKRIRMDSYTSYCNAVSDLHSASEIDMSVKAEMGLGDRKGSNGSLEEWYDQDKPEVSLLFQFLQILTACFGSFAHGGNDVSNAIGPLVALYLVYDTGDVSSKVATPIWLLLYGGVGICVGLWVWGRRVIQTMGKDLTPITPSSGFSIELASALTVVIASNIGLPISTTHCKVGSVVSVGWLRSKKAVDWRLFRNIFMAWFVTVPISGVISAAIMAIFRYVILRM

SEQ ID NO: 124 - DNA, 2916 bp, Homo sapiens
  CDS (81)..(2117)
tttttgatacctcatattctgtttacacatcttgaaaggcgctcagtagttctcttactaaacaaccactactccagagaatggcaacgctgattaccagtactacagctgctaccgccgcttctggtcctttggtggactacctatggatgctcatcctgggcttcattattgcatttgtcttggcattctccgtgggagccaatgatgtagcaaattcttttggtacagctgtgggctcaggtgtagtgaccctgaagcaagcctgcatcctagctagcatctttgaaacagtgggctctgtcttactgggggccaaagtgagcgaaaccatccggaagggcttgattgacgtggagatgtacaactcgactcaagggctgctgatggccggctcagtcagtgctatgtttggttctgctgtgtggcaactcgtggcttcgtttttgaagctccctatttctggaacccattgtattgttggtgcaactattggtttctccctcgtggcaaaggggcaggagggtgtcaagtggtctgaactgataaaaattgtgatgtcttggttcgtgtccccactgctttctggaattatgtctggaattttattcttcctggttcgtgcattcatcctccataaggcagatccagttcctaatggtttgcgagctttgccagttttctatgcctgcacagttggaataaacctcttttccatcatgtatactggagcaccgttgctgggctttgacaaacttcctctgtggggtaccatcctcatctcggtgggatgtgcagttttctgtgcccttatcgtctggttctttgtatgtcccaggatgaagagaaaaattgaacgagaaataaagtgtagtccttctgaaagccccttaatggaaaaaaagaatagcttgaaagaagaccatgaagaaacaaagttgtctgttggtgatattgaaaacaagcatcctgtttctgaggtagggcctgccactgtgcccctccaggctgtggtggaggagagaacagtctcattcaaacttggagatttggaggaagctccagagagagagaggcttcccagcgtggacttgaaagaggaaaccagcatagatagcaccgtgaatggtgcagtgcagttgcctaatgggaaccttgtccagttcagtcaagccgtcagcaaccaaataaactccagtggccactaccagtatcacaccgtgcataaggattccggcctgtacaaagagctactccataaattacatcttgccaaggtgggagattgcatgggagactccggtgacaaacccttaaggcgcaataatagctatacttcctataccatggcaatatgtggcatgcctctggattcattccgtgccaaagaaggtgaacagaagggcgaagaaatggagaagctgacatggcctaatgcagactccaagaagcgaattcgaatggacagttacaccagttactgcaatgctgtgtctgaccttcactcagcatctgagatagacatgagtgtcaaggcagagatgggtctaggtgacagaaaaggaagtaatggctctctagaagaatggtatgaccaggataagcctgaagtctctctcctcttccagttcctgcagatccttacagcctgctttgggtcattcgcccatggtggcaatgacgtaagcaatgccattgggcctctggttgctttatatttggtttatgacacaggagatgtttcttcaaaagtggcaacaccaatatggcttctactctatggtggtgttggtatctgtgttggtctgtgggtttggggaagaagagttatccagaccatggggaaggatctgacaccgatcacaccctctagtggcttcagtattgaactggcatctgccctcactgtggtgattgcatcaaatattggccttcccatcagtacaacacattgtaaagtgggctctgttgtgtctgttggctggctccggtccaagaaggctgttgactggcgtctctttcgtaacatttttatggcctggtttgtcacagtccctatttctggagttatcagtgctgccatcatggcaatcttcagatatgtcatcctcagaatgtgaagctgtttgagattaaaatttgtgtcaatgtttgggaccatcttaggtattcctgctcccctgaagaatgattacagtgttaacagaagactgacaagagtctttttatttgggagccagaggagggaagtgttacttgtgctataactgcttttgtgctaaatatgaattgtctcaaaattagctgtgtaaaatagcccgggttccactggctcctgctgaggtcccctttccttctgggctgtgaattcctgtacatatttctctactttttgtatcaggcttcaattccattatgttttaatgttgtctctgaagatgacttgtgatttttttttcttttttttaaaccatgaagagccgtttgacagagcatgctctgcgttgttggtttcaccagcttctgccctcacatgcacagggatttaacaacaaaaatataactacaacttcccttgtagtctcttatataagtagagtccttggtactctgccctcctgtcagtagtggcaggatctattggcatattcgggagcttcttagagggatgaggttctttgaacacagtgaaaatttaaattagtaacttttttgcaagcagtttattgactgttattgctaagaagaagtaagaaagaaaaagcctgttggcaatcttggttatttctttaagatttctggcagtgtgggatggatgaatgaagtggaatgtgaactttgggcaagttaaatgggacagccttccatgttcatttgtctacctcttaactgaataaaaaagcctacagtttttag

SEQ ID NO: 125 - protein, 288 aa, Homo sapiens
MERPQPDSMPQDLSEALKEATKEVHTQAENAEFMRNFQKGQVTRDGFKLVMASLYHIYVALEEEIERNKESPVFAPVYFPEELHRKAALEQDLAFWYGPRWQEVIPYTPAMQRYVKRLHEVGRTEPELLVAHAYTRYLGDLSGGQVLKKIAQKALDLPSSGEGLAFFTFPNIASATKFKQLYRSRMNSLEMTPAVRQRVIEEAKTAFLLNIQLFEELQELLTHDTKDQSPSRAPGLRQRASNKVQDSAPVETPRGKPPLNTRSQAPLLRWVLTLSFLVATVAVGLYAM

SEQ ID NO: 126 - DNA, 1550 bp, Homo sapiens
  CDS (81)..(944)
tcaacgcctgcctcccctcgagcgtcctcagcgcagccgccgcccgcggagccagcacgaacgagcccagcaccggccggatggagcgtccgcaacccgacagcatgccccaggatttgtcagaggccctgaaggaggccaccaaggaggtgcacacccaggcagagaatgctgagttcatgaggaactttcagaagggccaggtgacccgagacggcttcaagctggtgatggcctccctgtaccacatctatgtggccctggaggaggagattgagcgcaacaaggagagcccagtcttcgcccctgtctacttcccagaagagctgcaccgcaaggctgccctggagcaggacctggccttctggtacgggccccgctggcaggaggtcatcccctacacaccagccatgcagcgctatgtgaagcggctccacgaggtggggcgcacagagcccgagctgctggtggcccacgcctacacccgctacctgggtgacctgtctgggggccaggtgctcaaaaagattgcccagaaagccctggacctgcccagctctggcgagggcctggccttcttcaccttccccaacattgccagtgccaccaagttcaagcagctctaccgctcccgcatgaactccctggagatgactcccgcagtcaggcagagggtgatagaagaggccaagactgcgttcctgctcaacatccagctctttgaggagttgcaggagctgctgacccatgacaccaaggaccagagcccctcacgggcaccagggcttcgccagcgggccagcaacaaagtgcaagattctgcccccgtggagactcccagagggaagcccccactcaacacccgctcccaggctccgcttctccgatgggtccttacactcagctttctggtggcgacagttgctgtagggctttatgccatgtgaatgcaggcatgctggctcccagggccatgaactttgtccggtggaaggccttctttctagagagggaattctcttggctggcttccttaccgtgggcactgaaggctttcagggcctccagccctctcactgtgtccctctctctggaaaggaggaaggagcctatggcatcttccccaacgaaaagcacatccaggcaatggcctaaacttcagagggggcgaaggggtcagccctgcccttcagcatcctcagttcctgcagcagagcctggaagacaccctaatgtggcagctgtctcaaacctccaaaagccctgagtttcaagtatccttgttgacacggccatgaccactttccccgtgggccatggcaatttttacacaaacctgaaaagatgttgtgtcttgtgtttttgtcttatttttgttggagccactctgttcctggctcagcctcaaatgcagtatttttgttgtgttctgttgtttttatagcagggttggggtggtttttgagccatgcgtgggtggggagggaggtgtttaacggcactgtggccttggtctaacttttgtgtgaaataataaacaacattgtctg

SEQ ID NO: 127 - protein, 135 aa, Homo sapiens
MACGLVASNLNLKPGECLRVRGEVAPDAKSFVLNLGKDSNNLCLHFNPRFNAHGDANTIVCNSKDGGAWGTEQREAVFPFQPGSVAEVCITFDQANLTVKLPDGYEFKFPNRLNLEAINYMAADGDFKIKCVAFD

SEQ ID NO: 128 - DNA, 507 bp, Homo sapiens
  CDS (50)..(454)
cttctgacagctggtgcgcctgcccgggaacatcctcctggactcaatcatggcttgtggtctggtcgccagcaacctgaatctcaaacctggagagtgccttcgagtgcgaggcgaggtggctcctgacgctaagagcttcgtgctgaacctgggcaaagacagcaacaacctgtgcctgcacttcaaccctcgcttcaacgcccacggcgacgccaacaccatcgtgtgcaacagcaaggacggcggggcctgggggaccgagcagcgggaggctgtctttcccttccagcctggaagtgttgcagaggtgtgcatcaccttcgaccaggccaacctgaccgtcaagctgccagatggatacgaattcaagttccccaaccgcctcaacctggaggccatcaactacatggcagctgacggtgacttcaagatcaaatgtgtggcctttgactgaaatcagccagcccatggcccccaataaaggcagctgcctctgctcccctg

SEQ ID NO: 129 - protein, 662 aa, Homo sapiens
MNKEIPNGNTSELIFNAVHVKDAGFYVCRVNNNFTFEFSQWSQLDVCDIPESFQRSVDGVSESKLQICVEPTSQKLMPGSTLVLQCVAVGSPIPHYQWFKNELPLTHETKKLYMVPYVDLEHQGTYWCHVYNDRDSQDSKKVEIIIGRTDEAVECTEDELNNLGHPDNKEQTTDQPLAKDKVALLIGNMNYREHPKLKAPLVDVYELTNLLRQLDFKVVSLLDLTEYEMRNAVDEFLLLLDKGVYGLLYYAGHGYENFGNSFMVPVDAPNPYRSENCLCVQNILKLMQEKETGLNVFLLDMCRKRNDYDDTIPILDALKVTANIVFGYATCQGAEAFEIQHSGLANGIFMKFLKDRLLEDKKITVLLDEVAEDMGKCHLTKGKQALEIRSSLSEKRALTDPIQGTEYSAESLVRNLQWAKAHELPESMCLKFDCGVQIQLGFAAEFSNVMIIYTSIVYKPPEIIMCDAYVTDFPLDLDIDPKDANKGTPEETGSYLVSKDLPKHCLYTRLSSLQKLKEHLVFTVCLSYQYSGLEDTVEDKQEVNVGKPLIAKLDMHRGLGRKTCFQTCLMSNGPYQSSAATSGGAGHYHSLQDPFHGVYHSHPGNPSNVTPADSCHCSRTPDAFISSFAHHASCHFSRSNVPVETTDEIPFSFSDRLRISEK

SEQ ID NO: 130 - DNA, 2251 bp, Homo sapiens
  CDS (74)..(2059)
cttggctggacagtttgtgaaactgtgttgccgggcaactggacatccttttgttcaatatcagtggttcaaaatgaataaagagattccaaatggaaatacatcagagcttatttttaatgcagtgcatgtaaaagatgcaggcttttatgtctgtcgagttaataacaatttcacctttgaattcagccagtggtcacagctggatgtttgcgacatcccagagagcttccagagaagtgttgatggcgtctctgaatccaagttgcaaatctgtgttgaaccaacttcccaaaagctgatgccaggcagcacattggttttacagtgtgttgctgttggaagccctattcctcactaccagtggttcaaaaatgaattaccattaacacatgagaccaaaaagctatacatggtgccttatgtggatttggaacaccaaggaacctactggtgtcatgtatataatgatcgagacagtcaagatagcaagaaggtagaaatcatcataggaagaacagatgaggcagtggagtgcactgaagatgaattaaataatcttggtcatcctgataataaagagcaaacaactgaccagcctttggcgaaggacaaggttgcccttttgataggaaatatgaattaccgggagcaccccaagctcaaagctcctttggtggatgtgtacgaattgactaacttactgagacagctggacttcaaagtggtttcactgttggatcttactgaatatgagatgcgtaatgctgtggatgagtttttactccttttagacaagggagtatatgggttattatattatgcaggacatggttatgaaaattttgggaacagcttcatggtccccgttgatgctccaaatccatataggtctgaaaattgtctgtgtgtacaaaatatactgaaattgatgcaagaaaaagaaactggacttaatgtgttcttattggatatgtgtaggaaaagaaatgactacgatgataccattccaatcttggatgcactaaaagtcaccgccaatattgtgtttggatatgccacgtgtcaaggagcagaagcttttgaaatccagcattctggattggcaaatggaatctttatgaaatttttaaaagacagattattagaagataagaaaatcactgtgttactggatgaagttgcagaagatatgggtaagtgtcaccttaccaaaggcaaacaggctctagagattcgaagtagtttatctgagaagagagcacttactgatccaatacagggaacagaatattctgctgaatctcttgtgcggaatctacagtgggccaaggctcatgaacttccagaaagtatgtgtcttaagtttgactgtggtgttcagattcaattaggatttgcagctgagttttccaatgtcatgatcatctatacaagtatagtttacaaaccaccggagataataatgtgtgatgcctacgttactgattttccacttgatctagatattgatccaaaagatgcaaataaaggcacacctgaagaaactggcagctacttggtatcaaaggatcttcccaagcattgcctctataccagactcagttcactgcaaaaattaaaggaacatctagtcttcacagtatgtttatcatatcagtactcaggattggaagatactgtagaggacaagcaggaagtgaatgttgggaaacctctcattgctaaattagacatgcatcgaggtttgggaaggaagacttgctttcaaacttgtcttatgtctaatggtccttaccagagttctgcagccacctcaggaggagcagggcattatcactcattgcaagacccattccatggtgtttaccattcacatcctggtaatccaagtaatgttacaccagcagatagctgtcattgcagccggactccagatgcatttatttcaagtttcgctcaccatgcttcatgtcattttagtagaagtaatgtgccagtagagacaactgatgaaataccatttagtttctctgacaggctcagaatttctgaaaaatgacctccttgtttttgaaagttagcataattttagatgcctgtgaaatagtactgcacttacataaagtgagacattgtgaaaaggcaaatttgtatatgtagagaaagaatagtagtaactgtttcatagcaaacttcaggactttgagatgttgaaattacattatttaattacagacttcctctttct

SEQ ID NO: 131 - protein, 824 aa, Homo sapiens
MSLLGDPLQALPPSAAPTGPLLAPPAGATLNRLREPLLRRLSELLDQAPEGRGWRRLAELAGSRGRLRLSCLDLEQCSLKVLEPEGSPSLCLLKLMGEKGCTVTELSDFLQAMEHTEVLQLLSPPGIKITVNPESKAVLAGQFVKLCCRATGHPFVQYQWFKMNKEIPNGNTSELIFNAVHVKDAGFYVCRVNNNFTFEFSQWSQLDVCDIPESFQRSVDGVSESKLQICVEPTSQKLMPGSTLVLQCVAVGSPIPHYQWFKNELPLTHETKKLYMVPYVDLEHQGTYWCHVYNDRDSQDSKKVEIIIGRTDEAVECTEDELNNLGHPDNKEQTTDQPLAKDKVALLIGNMNYREHPKLKAPLVDVYELTNLLRQLDFKVVSLLDLTEYEMRNAVDEFLLLLDKGVYGLLYYAGHGYENFGNSFMVPVDAPNPYRSENCLCVQNILKLMQEKETGLNVFLLDMCRKRNDYDDTIPILDALKVTANIVFGYATCQGAEAFEIQHSGLANGIFMKFLKDRLLEDKKITVLLDEVAEDMGKCHLTKGKQALEIRSSLSEKRALTDPIQGTEYSAESLVRNLQWAKAHELPESMCLKFDCGVQIQLGFAAEFSNVMIIYTSIVYKPPEIIMCDAYVTDFPLDLDIDPKDANKGTPEETGSYLVSKDLPKHCLYTRLSSLQKLKEHLVFTVCLSYQYSGLEDTVEDKQEVNVGKPLIAKLDMHRGLGRKTCFQTCLMSNGPYQSSAATSGGAGHYHSLQDPFHGVYHSHPGNPSNVTPADSCHCSRTPDAFISSFAHHASCHFSRSNVPVETTDEIPFSFSDRLRISEK

SEQ ID NO: 132 - DNA, 2828 bp, Homo sapiens
  CDS (165)..(2636)
ggggcggggagcggacttcctcctctgagggccgtgccgcgctgccagatttgttcttccgcccctgcctccgcggctcggaggcgagcggaaggtgccccggggccgaggcccgtgacggggcgggcgggagccccggcagtccggggtcgccggcgagggccatgtcgctgttgggggacccgctacaggccctgccgccctcggccgcccccacggggccgctgctcgcccctccggccggcgcgaccctcaaccgcctgcgggagccgctgctgcggaggctcagcgagctcctggatcaggcgcccgagggccggggctggaggagactggcggagctggcggggagtcgcgggcgcctccgcctcagttgcctagacctggagcagtgttctcttaaggtactggagcctgaaggaagccccagcctgtgtctgctgaagttaatgggtgaaaaaggttgcacagtcacagaattgagtgatttcctgcaggctatggaacacactgaagttcttcagcttctcagccccccaggaataaagattactgtaaacccagagtcaaaggcagtcttggctggacagtttgtgaaactgtgttgccgggcaactggacatccttttgttcaatatcagtggttcaaaatgaataaagagattccaaatggaaatacatcagagcttatttttaatgcagtgcatgtaaaagatgcaggcttttatgtctgtcgagttaataacaatttcacctttgaattcagccagtggtcacagctggatgtttgcgacatcccagagagcttccagagaagtgttgatggcgtctctgaatccaagttgcaaatctgtgttgaaccaacttcccaaaagctgatgccaggcagcacattggttttacagtgtgttgctgttggaagccctattcctcactaccagtggttcaaaaatgaattaccattaacacatgagaccaaaaagctatacatggtgccttatgtggatttggaacaccaaggaacctactggtgtcatgtatataatgatcgagacagtcaagatagcaagaaggtagaaatcatcataggaagaacagatgaggcagtggagtgcactgaagatgaattaaataatcttggtcatcctgataataaagagcaaacaactgaccagcctttggcgaaggacaaggttgcccttttgataggaaatatgaattaccgggagcaccccaagctcaaagctcctttggtggatgtgtacgaattgactaacttactgagacagctggacttcaaagtggtttcactgttggatcttactgaatatgagatgcgtaatgctgtggatgagtttttactccttttagacaagggagtatatgggttattatattatgcaggacatggttatgaaaattttgggaacagcttcatggtccccgttgatgctccaaatccatataggtctgaaaattgtctgtgtgtacaaaatatactgaaattgatgcaagaaaaagaaactggacttaatgtgttcttattggatatgtgtaggaaaagaaatgactacgatgataccattccaatcttggatgcactaaaagtcaccgccaatattgtgtttggatatgccacgtgtcaaggagcagaagcttttgaaatccagcattctggattggcaaatggaatctttatgaaatttttaaaagacagattattagaagataagaaaatcactgtgttactggatgaagttgcagaagatatgggtaagtgtcaccttaccaaaggcaaacaggctctagagattcgaagtagtttatctgagaagagagcacttactgatccaatacagggaacagaatattctgctgaatctcttgtgcggaatctacagtgggccaaggctcatgaacttccagaaagtatgtgtcttaagtttgactgtggtgttcagattcaattaggatttgcagctgagttttccaatgtcatgatcatctatacaagtatagtttacaaaccaccggagataataatgtgtgatgcctacgttactgattttccacttgatctagatattgatccaaaagatgcaaataaaggcacacctgaagaaactggcagctacttggtatcaaaggatcttcccaagcattgcctctataccagactcagttcactgcaaaaattaaaggaacatctagtcttcacagtatgtttatcatatcagtactcaggattggaagatactgtagaggacaagcaggaagtgaatgttgggaaacctctcattgctaaattagacatgcatcgaggtttgggaaggaagacttgctttcaaacttgtcttatgtctaatggtccttaccagagttctgcagccacctcaggaggagcagggcattatcactcattgcaagacccattccatggtgtttaccattcacatcctggtaatccaagtaatgttacaccagcagatagctgtcattgcagccggactccagatgcatttatttcaagtttcgctcaccatgcttcatgtcattttagtagaagtaatgtgccagtagagacaactgatgaaataccatttagtttctctgacaggctcagaatttctgaaaaatgacctccttgtttttgaaagttagcataattttagatgcctgtgaaatagtactgcacttacataaagtgagacattgtgaaaaggcaaatttgtatatgtagagaaagaatagtagtaactgtttcatagcaaacttcaggactttgagatgttgaaattacattatttaattacagacttcctctttct

SEQ ID NO: 133 - protein, 919 aa, Homo sapiens
MKVARFQKIPNGENETMIPVLTSKKASELPVSEVASILQADLQNGLNKCEVSHRRAFHGWNEFDISEDEPLWKKYISQFKNPLIMLLLASAVISVLMHQFDDAVSITVAILIVVTVAFVQEYRSEKSLEELSKLVPPECHCVREGKLEHTLARDLVPGDTVCLSVGDRVPADLRLFEAVDLSIDESSLTGETTPCSKVTAPQPAATNGDLASRSNIAFMGTLVRCGKAKGVVIGTGENSEFGEVFKMMQAEEAPKTPLQKSMDLLGKQLSFYSFGIIGIIMLVGWLLGKDILEMFTISVSLAVAAIPEGLPIVVTVTLALGVMRMVKKRAIVKKLPIVETLGCCNVICSDKTGTLTKNEMTVTHIFTSDGLHAEVTGVGYNQFGEVIVDGDVVHGFYNPAVSRIVEAGCVCNDAVIRNNTLMGKPTEGALIALAMKMGLDGLQQDYIRKAEYPFSSEQKWMAVKCVHRTQQDRPEICFMKGAYEQVIKYCTTYQSKGQTLTLTQQQRDVYQQEKARMGSAGLRVLALASGPELGQLTFLGLVGIIDPPRTGVKEAVTTLIASGVSIKMITGDSQETAVAIASRLGLYSKTSQSVSGEEIDAMDVQQLSQIVPKVAVFYRASPRHKMKIIKSLQKNGSVVAMTGDGVNDAVALKAADIGVAMGQTGTDVCKEAADMILVDDDFQTIMSAIEEGKGIYNNIKNFVRFQLSTSIAALTLISLATLMNFPNPLNAMQILWINIIMDGPPAQSLGVEPVDKDVIRKPPRNWKDSILTKNLILKILVSSIIIVCGTLFVFWRELRDNVITPRDTTMTFTCFVFFDMFNALSSRSQTKSVFEIGLCSNRMFCYAVLGSIMGQLLVIYFPPLQKVFQTESLSILDLLFLLGLTSSVCIVAEIIKKVERSREKIQKHVSSTSSSFLEV

SEQ ID NO: 134 - DNA, 3612 bp, Homo sapiens
  CDS (427)..(3183)
acggcctcgcggagccggcccggcggaccgtgacgggtcccctcacctcctcttctctcccctccccgcccgccctctctccctcccttcctccctcccgctcgcttcttctcacgccgggagcaggctcccgcctcgcaccgctgccccgcgagcagctcctcttctcccgaggcgcgcggggcgcccccgcgagccccgcggctgagaccccgcagcctggaggagggctgtccggggctttggatgctgctgctaggggtggtgggagcagccgtgggacgcgtggccgggagcgggggtgacagcctgggattccgggggcttctcttccttgtcctcctcctctcctctctattcccagtgtggccgtggctgacactaaagactttgtagccatcaacccgagtgcagtttcgatggaaaatgaaggttgcacgttttcaaaaaatacctaatggtgaaaatgagacaatgattcctgtattgacatcaaaaaaagcaagtgaattaccagtcagtgaagttgcaagcattctccaagctgatcttcagaatggtctaaacaaatgtgaagttagtcataggcgagcctttcatggctggaatgagtttgatattagtgaagatgagccactgtggaagaagtatatttctcagtttaaaaatccccttattatgctgcttctggcttctgcagtcatcagtgttttaatgcatcagtttgatgatgccgtcagtatcactgtggcaatacttatcgttgttacagttgcctttgttcaggaatatcgttcagaaaaatctcttgaagaattgagtaaacttgtgccaccagaatgccattgtgtgcgtgaaggaaaattggagcatacacttgcccgagacttggttccaggtgatacagtttgcctttctgttggggatagagttcctgctgacttacgcttgtttgaggctgtggatctttccattgatgagtccagcttgacaggtgagacaacgccttgttctaaggtgacagctcctcagccagctgcaactaatggagatcttgcatcgagaagtaacattgcctttatgggaacactggtcagatgtggcaaagcaaagggtgttgtcattggaacaggagaaaattctgaatttggggaggtttttaaaatgatgcaagcagaagaggcaccaaaaacccctctgcagaagagcatggacctcttaggaaaacaactttccttttactcctttggtataataggaatcatcatgttggttggctggttactgggaaaagatatcctggaaatgtttactattagtgtaagtttggctgtagcagcaattcctgaaggtctccccattgtggtcacagtgacgctagctcttggtgttatgagaatggtgaagaaaagggccattgtgaaaaagctgcctattgttgaaactctgggctgctgtaatgtgatttgttcagataaaactggaacactgacgaagaatgaaatgactgttactcacatatttacttcagatggtctgcatgctgaggttactggagttggctataatcaatttggggaagtgattgttgatggtgatgttgttcatggattctataacccagctgttagcagaattgttgaggcgggctgtgtgtgcaatgatgctgtaattagaaacaatactctaatggggaagccaacagaaggggccttaattgctcttgcaatgaagatgggtcttgatggacttcaacaagactacatcagaaaagctgaatacccttttagctctgagcaaaagtggatggctgttaagtgtgtacaccgaacacagcaggacagaccagagatttgttttatgaaaggtgcttacgaacaagtaattaagtactgtactacataccagagcaaagggcagaccttgacacttactcagcagcagagagatgtgtaccaacaagagaaggcacgcatgggctcagcgggactcagagttcttgctttggcttctggtcctgaactgggacagctgacatttcttggcttggtgggaatcattgatccacctagaactggtgtgaaagaagctgttacaacactcattgcctcaggagtatcaataaaaatgattactggagattcacaggagactgcagttgcaatcgccagtcgtctgggattgtattccaaaacttcccagtcagtctcaggagaagaaatagatgcaatggatgttcagcagctttcacaaatagtaccaaaggttgcagtattttacagagctagcccaaggcacaagatgaaaattattaagtcgctacagaagaacggttcagttgtagccatgacaggagatggagtaaatgatgcagttgctctgaaggctgcagacattggagttgcgatgggccagactggtacagatgtttgcaaagaggcagcagacatgatcctagtggatgatgattttcaaaccataatgtctgcaatcgaagagggtaaagggatttataataacattaaaaatttcgttagattccagctgagcacgagtatagcagcattaactttaatctcattggctacattaatgaactttcctaatcctctcaatgccatgcagattttgtggatcaatattattatggatggacccccagctcagagccttggagtagaaccagtggataaagatgtcattcgtaaacctcctcgcaactggaaagacagcattttgactaaaaacttgatacttaaaatacttgtttcatcaataatcattgtttgtgggactttgtttgtcttctggcgtgagctacgagacaatgtgattacacctcgagacacaacaatgaccttcacatgctttgtgttttttgacatgttcaatgcactaagttccagatcccagaccaagtctgtgtttgagattggactctgcagtaatagaatgttttgctatgcagttcttggatccatcatgggacaattactagttatttactttcctccgcttcagaaggtttttcagactgagagcctaagcatactggatctgttgtttcttttgggtctcacctcatcagtgtgcatagtggcagaaattataaagaaggttgaaaggagcagggaaaagatccagaagcatgttagttcgacatcatcatcttttcttgaagtatgatgcatattgcattattttatttgcaaactaggaattgcagtctgaggatcatttagaagggcaagttcaagaggatatgaagatttgagaactttttaactattcattgactaaaaatgaacattaatgttaaagacttaagactttaacctgctggcagtcccaaatgaaattatgcaactttgatatcatattccttgatttaaattggcttttgtgattgagtgaaactttataaagcatatggtcagttatttaattaaaaaggcaaaacctgaaccaccttctgcacttaaagaagtctaacagtacaaatacactatctatcttagatagatatatttttttttatttttaaatattgtactatttatggtggtggggctttcttactaatacacaaataaatttaatcatttcaaaggc

SEQ ID NO: 135 - protein, 382 aa, Homo sapiens
MGAFLDKPKMEKHNAQGQGNGLRYGLSSMQGWRVEMEDAHTAVIGLPSGLESWSFFAVYDGHAGSQVAKYCCEHLLDHITNNQDFKGSAGAPSVENVKNGIRTGFLEIDEHMRVMSEKKHGADRSGSTAVGVLISPQHTYFINCGDSRGLLCRNRKVHFFTQDHKPSNPLEKERIQNAGGSVMIQRVNGSLAVSRALGDFDYKCVHGKGPTEQLVSPEPEVHDIERSEEDDQFIILACDGIWDVMGNEELCDFVRSRLEVTDDLEKVCNEVVDTCLYKGSRDNMSVILICFPNAPKVSPEAVKKEAELDKYLECRVEEIIKKQGEGVPDLVHVMRTLASENIPSLPPGGELASKRNVIEAVYNRLNPYKNDDTDSTSTDDMW

SEQ ID NO: 136 - DNA, 2467 bp, Homo sapiens
  CDS (444)..(1589)
acgggagcgcgcgcgggagctagagagcagtggtctcggcgctcgtccggcccgcagcttcgggtcctcaggcggctgttgctccggaacgggtggttggggaggggggggtggggggactctagacagctgaggcgcgaaagcgatgagtcctcggctcttcctcctccttctccgggacccgctctctgcctccctctccaacgcccggatgatctgagccgcgagggcgccgacagccgggggcccggacgcagcccggctcctcccctcctccgccccttccccagcctgacctggcccgccgctgcagcggtgacccctcccccggctgccgccgtcgccgccgcggtgaccccctccccggctgccgccgccgccgcctcggccgaccagggacctgcccgcctgcggctgctccggacctagaggatcaagacataatgggagcatttttagacaagccaaagatggaaaagcataatgcccaggggcagggtaatgggttgcgatatgggctaagcagcatgcaaggctggcgtgttgaaatggaggatgcacatacggctgtgatcggtttgccaagtggacttgaatcgtggtcattctttgctgtgtatgatgggcatgctggttctcaggttgccaaatactgctgtgagcatttgttagatcacatcaccaataaccaggattttaaagggtctgcaggagcaccttctgtggaaaatgtaaagaatggaatcagaacaggttttctggagattgatgaacacatgagagttatgtcagagaagaaacatggtgcagatagaagtgggtcaacagctgtaggtgtcttaatttctccccaacatacttatttcattaactgtggagactcaagaggtttactttgtaggaacaggaaagttcatttcttcacacaagatcacaaaccaagtaatccgctggagaaagaacgaattcagaatgcaggtggctctgtaatgattcagcgtgtgaatggctctctggctgtatcgagggcccttggggattttgattacaaatgtgtccatggaaaaggtcctactgagcagcttgtctcaccagagcctgaagtccatgatattgaaagatctgaagaagatgatcagttcattatccttgcatgtgatggtatctgggatgttatgggaaatgaagagctctgtgattttgtaagatccagacttgaagtcactgatgaccttgagaaagtttgcaatgaagtagtcgacacctgtttgtataagggaagtcgagacaacatgagtgtgattttgatctgttttccaaatgcacccaaagtatcgccagaagcagtgaagaaggaggcagagttggacaagtacctggaatgcagagtagaagaaatcataaagaagcagggggaaggcgtccccgacttagtccatgtgatgcgcacattagcgagtgagaacatccccagcctcccaccagggggtgaattggcaagcaagaggaatgttattgaagccgtttacaatagactgaatccttacaaaaatgacgacactgactctacatcaacagatgatatgtggtaaaactgctcatctagccatggagtttaccttcacctccaaaggagagtacagctcaactttgttgaaacttttaacatccatcctcaactttaaggaaggggatatgacatgggtgagaatgattacatcagagaacttcagcagtacaacagctagcccagaactgattttttttttttttttgtaaatttgagacttatgtaagcgtgatttcaaaccataattcgtgttgtaaatcagactccagcaatttttgttgtatgattttgtttttttgtaaagtgtaattgtccttgtacaaaatgctcatatttaattatgaactgctttaaatcactatcaaagttacaagaaatgtttggcttattgtgtgatgcaacagatatatagccctttcaagtcatgttgtgtttggacttggggttggaacagggagagcagcagccatgtcagctacacgctcaaatgtgcagatgattatggaaaataacctcaaaatcttacaaagctgaacatccaaggagttattgaaaactatcttaaatgttcttggtaggggagttggcattgttgataaagccagtcccttcatttaactgtctttcaggatgttccttcgttgtttccatgagtattgcaggtaataatacagtgtattcataagaatctcaatcttggggctaaatgccttgtttctttgcacctcttttcaagtccttacatttaattactaattgataagcagcagcttcctacatatagtaggaaactgccacatttttgctatcatgattggctgggcctgctgctgttcctagtaagatattctgaattccattttatcaataaagcttgatttaacaaacaagaaactt

SEQ ID NO: 137 - protein, 358 aa, Homo sapiens
MMQRVFRGKLLSNDEVTIKYKDEDGDLITIFDSSDLSFAIQCSRILKLTLFVNGQPRPLESSQVKYLRRELIELRNKVNRLLDSLEPPGEPGPSTNIPENDTVDGREEKSASDSSGKQSTQVMAASMSAFDPLKNQDEINKNVMSAFGLTDDQVSGPPSAPAEDRSGTPDSIASSSSAAHPPGVQPQQPPYTGAQTQAGQMYQQYQQQAGYGAQQPQAPPQQPQQYGIQYSASYSQQTGPQQPQQFQGYGQQPTSQAPAPAFSGQPQQLPAQPPQQYQASNYPAQTYTAQTSQPTNYTVAPASQPGMAPSQPGAYQPRPGFTSLPGSTMTPPPSGPNPYARNRPPFGQGYTQPGPGYR

SEQ ID NO: 138 - DNA, 1519 bp, Homo sapiens
  CDS (11)..(1084)
attagtgctaatgatgcaacgagttttcagaggaaaacttctgagtaatgatgaagtaacaataaagtataaagatgaagatggagatcttataacaatttttgatagttctgacctttcctttgcaattcagtgcagtaggatactgaaactgacattatttgttaatggccagccaagaccccttgaatcaagtcaggtgaaatatctccgtcgagaactgatagaacttcgaaataaagtgaatcgtttattggatagcttggaaccacctggagaaccaggaccttccaccaatattcctgaaaatgatactgtggatggtagggaagaaaagtctgcttctgattcttctggaaaacagtctactcaggttatggcagcaagtatgtctgcttttgatcctttaaaaaaccaagatgaaatcaataaaaatgttatgtcagcgtttggcttaacagatgatcaggtttcagggccacccagtgctcctgcagaagatcgttcaggaacacccgacagcattgcttcctcctcctcagcagctcacccaccaggcgttcagccacagcagccaccatatacaggagctcagactcaagcaggtcagatgtaccaacagtaccagcaacaggccggctatggtgcacagcagccgcaggctccacctcagcagcctcaacagtatggtattcagtattcagcaagctatagtcagcagactggaccccaacaacctcagcagttccagggatatggccagcaaccaacttcccaggcaccagctcctgccttttctggtcagcctcaacaactgcctgctcagccgccacagcagtaccaggcgagcaattatcctgcacaaacttacactgcccaaacttctcagcctactaattatactgtggctcctgcctctcaacctggaatggctccaagccaacctggggcctatcaaccaagaccaggttttacttcacttcctggaagtaccatgacccctcctccaagtgggcctaatccttatgcgcgtaaccgtcctccctttggtcagggctatacccaacctggacctggttatcgataaggaggctcctctacaccaattaatgtagctgctagctattggcctcccaaaagactccagtactattttaatttgtattgaagaagttcagaaatttaaaagcagagcattttttatgatatcattgttggtgttaattgaaagtataatttgctggaacacaaagaccaaaatgaaagttttttcctccctgcttaaaaatgtagcagcttcttagttactttggaacactactcttacatgtataaagtgattgacttgactttctagcttcccttgtccggaggatattaaaatgctagggtgaggtttagccatcttacttggctttttactattaacatgatgtactaaagtagagccctttgagaatacaagatattatgtataaaatgtaacactgatgataggttaataaagatgattgaatcc

SEQ ID NO: 139 - protein, 396 aa, Homo sapiens [sequence omitted]

SEQ ID NO: 140 - DNA, 1641 bp, Homo sapiens
  CDS (19)..(1206)
aacatcctggagtccaccatgaacggacagttggatctaagtgggaagctaatcgtcaaagctcaacttggggaggatattcggcgaattcctattcataatgaagatattacttatgatgaattagtgctaatgatgcaacgagttttcagaggaaaacttctgagtaatgatgaagtaacaataaagtataaagatgaagatggagatcttataacaatttttgatagttctgacctttcctttgcaattcagtgcagtaggatactgaaactgacattatttgttaatggccagccaagaccccttgaatcaagtcaggtgaaatatctccgtcgagaactgatagaacttcgaaataaagtgaatcgtttattggatagcttggaaccacctggagaaccaggaccttccaccaatattcctgaaaatgatactgtggatggtagggaagaaaagtctgcttctgattcttctggaaaacagtctactcaggttatggcagcaagtatgtctgcttttgatcctttaaaaaaccaagatgaaatcaataaaaatgttatgtcagcgtttggcttaacagatgatcaggtttcagggccacccagtgctcctgcagaagatcgttcaggaacacccgacagcattgcttcctcctcctcagcagctcacccaccaggcgttcagccacagcagccaccatatacaggagctcagactcaagcaggtcagatgtaccaacagtaccagcaacaggccggctatggtgcacagcagccgcaggctccacctcagcagcctcaacagtatggtattcagtattcagcaagctatagtcagcagactggaccccaacaacctcagcagttccagggatatggccagcaaccaacttcccaggcaccagctcctgccttttctggtcagcctcaacaactgcctgctcagccgccacagcagtaccaggcgagcaattatcctgcacaaacttacactgcccaaacttctcagcctactaattatactgtggctcctgcctctcaacctggaatggctccaagccaacctggggcctatcaaccaagaccaggttttacttcacttcctggaagtaccatgacccctcctccaagtgggcctaatccttatgcgcgtaaccgtcctccctttggtcagggctatacccaacctggacctggttatcgataaggaggctcctctacaccaattaatgtagctgctagctattggcctcccaaaagactccagtactattttaatttgtattgaagaagttcagaaatttaaaagcagagcattttttatgatatcattgttggtgttaattgaaagtataatttgctggaacacaaagaccaaaatgaaagttttttcctccctgcttaaaaatgtagcagcttcttagttactttggaacactactcttacatgtataaagtgattgacttgactttctagcttcccttgtccggaggatattaaaatgctagggtgaggtttagccatcttacttggctttttactattaacatgatgtactaaagtagagccctttgagaatacaagatattatgtataaaatgtaacactgatgataggttaataaagatgattgaatcc

SEQ ID NO: 141 - protein, 323 aa, Homo sapiens
MAFSGSQAPYLSPAVPFSGTIQGGLQDGLQITVNGTVLSSSGTRFAVNFQTGFSGNDIAFHFNPRFEDGGYVVCNTRQNGSWGPEERKTHMPFQKGMPFDLCFLVQSSDFKVMVNGILFVQYFHRVPFHRVDTISVNGSVQLSYISFQPPGVWPANPAPITQTVIHTVQSAPGQMFSTPAIPPMMYPHPAYPMPFITTILGGLYPSKSILLSGTVLPSAQRFHINLCSGNHIAFHLNPRFDENAVVRNTQIDNSWGSEERSLPRKMPFVRGQSFSVWILCEAHCLKVAVDGQHLFEYYHRLRNLPTINRLEVGGDIQLTHVQT

SEQ ID NO: 142 - DNA, 1616 bp, Homo sapiens
  CDS (72)..(1040)
aagtcgttccctctacaaaggacttcctagtgggtgtgaaaggcagcggtggccacagaggcggcggagagatggccttcagcggttcccaggctccctacctgagtccagctgtccccttttctgggactattcaaggaggtctccaggacggacttcagatcactgtcaatgggaccgttctcagctccagtggaaccaggtttgctgtgaactttcagactggcttcagtggaaatgacattgccttccacttcaaccctcggtttgaagatggagggtacgtggtgtgcaacacgaggcagaacggaagctgggggcccgaggagaggaagacacacatgcctttccagaaggggatgccctttgacctctgcttcctggtgcagagctcagatttcaaggtgatggtgaacgggatcctcttcgtgcagtacttccaccgcgtgcccttccaccgtgtggacaccatctccgtcaatggctctgtgcagctgtcctacatcagcttccagcctcccggcgtgtggcctgccaacccggctcccattacccagacagtcatccacacagtgcagagcgcccctggacagatgttctctactcccgccatcccacctatgatgtacccccaccccgcctatccgatgcctttcatcaccaccattctgggagggctgtacccatccaagtccatcctcctgtcaggcactgtcctgcccagtgctcagaggttccacatcaacctgtgctctgggaaccacatcgccttccacctgaacccccgttttgatgagaatgctgtggtccgcaacacccagatcgacaactcctgggggtctgaggagcgaagtctgccccgaaaaatgcccttcgtccgtggccagagcttctcagtgtggatcttgtgtgaagctcactgcctcaaggtggccgtggatggtcagcacctgtttgaatactaccatcgcctgaggaacctgcccaccatcaacagactggaagtggggggcgacatccagctgacccatgtgcagacataggcggcttcctggccctggggccgggggctggggtgtggggcagtctgggtcctctcatcatccccacttcccaggcccagcctttccaaccctgcctgggatctgggctttaatgcagaggccatgtccttgtctggtcctgcttctggctacagccaccctggaacggagaaggcagctgacggggattgccttcctcagccgcagcagcacctggggctccagctgctggaatcctaccatcccaggaggcaggcacagccagggagaggggaggagtgggcagtgaagatgaagccccatgctcagtcccctcccatcccccacgcagctccaccccagtcccaagccaccagctgtctgctcctggtgggaggtggcctcctcagcccctcctctctgacctttaacctcactctcaccttgcaccgtgcaccaacccttcacccctcctggaaagcaggcctgatggcttcccactggcctccaccacctgaccagagtgttctcttcagaggactggctcctttcccagtgtccttaaaataaagaaatgaaaatgcttgttggcac

SEQ ID NO: 143 - protein, 136 aa, Homo sapiens
MAGAIIENMSTKKLCIVGGILLVFQIIAFLVGGLIAPGPTTAVSYMSVKCVDARKNHHKTKWFVPWGPNHCDKIRDIEEAIPREIEANDIVFSVHIPLPHMALSCGFLDQRHGHLSVCLLTVAFGGRFLQPLMHCV

SEQ ID NO: 144 - DNA, 1252 bp, Homo sapiens
  CDS (225)..(632)
acaatcacagctccgggcattgggggaacccgagccggctgcgccgggggaatccgtgcgggcgccttccgtcccggtcccatcctcgccgcgctccagcacctctgaagttttgcagcgcccagaaaggaggcgaggaaggagggagtgtgtgagaggagggagcaaaaagctcaccctaaaacatttatttcaaggagaaaagaaaaagggggggcgcaaaaatggctggggcaattatagaaaacatgagcaccaagaagctgtgcattgttggtgggattctgctcgtgttccaaatcatcgcctttctggtgggaggcttgattgctccagggcccacaacggcagtgtcctacatgtcggtgaaatgtgtggatgcccgtaagaaccatcacaagacaaaatggttcgtgccttggggacccaatcattgtgacaagatccgagacattgaagaggcaattccaagggaaattgaagccaatgacatcgtgttttctgttcacattcccctcccccacatggctcttagctgtggtttcttggaccagcggcatggacatttgtcagtttgccttctgacggtagcttttggaggaagattcctgcagccactaatgcattgtgtatgataacaaaaactctggtatgacacattttctgtgatcattgttaattagtgacatagtaacatctgtagcagctggttagtaaacctcatgtgggggtggggtgggggtgtattccttgggggatggtttgggccgaatggggagtggaatatttgacatttttcctgttttaaattctaggatagattttaacatcctttgcggtcccagtccaaggtaggctggtgtcatagtcttctcactcctaatccatgaccactgtttttttcctatttatatcaccaggtagcctactgagttaatatttaagttgtcaatagataagtgtccctgttttgtggcataatataactgaatttcatgagaagatttattccaccaggggtatttcagctttgaaaccaaatctgtgtatctaatactaaccaatctgttggatgtgggttttaaaaaatgtttgctaaactacccaagtaagatttactgtattaaatggccttcgggtctgaaaagcttttttaacctcttgcttaaaatgcgttttattttgataagatacttcaaatagcctccaaaagtgtagatccaatcacttaaataaacctgtatgtatatgc

SEQ ID NO: 145 - protein, 468 aa, Homo sapiens
MPVRTITRQNGSCLGDPIIVTRSETLKRQFQFMLFILQLDIAFKLNNQIRENAEVSMDVSLAYRDDAFAEWTEMAHERVPRKLKCTFTSPKTPEHEGRYYECDVLPFMEIGSVAHKFYLLNIRLPVNEKKKINVGIGEIKDIRLVGIHQNGGFTKVWFAMKTFLTPSIFIIMVWYWRRITMMSRPPVLLEKVIFALGISMTFINIPVEWFSIGFDWTWMLLFGDIRQGIFYAMLLSFWIIFCGEHMMDQHERNHIAGYWKQVGPIAVGSFCLFIFDMCERGVQLTNPFYSIWTTDIGTELAMAFIIVAGICLCLYFLFLCFMVFQVFRNISGKQSSLPAMSKVRRLHYEGLIFRFKFLMLITLACAAMTVIFFIVSQVTEGHWKWGGVTVQVNSAFFTGIYGMWNLYVFALMFLYAPSHKNYGEDQSNGMQLPCKSREDCALFVSELYQELFSASKYSFINDNAASGI

SEQ ID NO: 146 - DNA, 1943 bp, Homo sapiens
  CDS (379)..(1782)
acaatcacagctccgggcattgggggaacccgagccggctgcgccgggggaatccgtgcgggcgccttccgtcccggtcccatcctcgccgcgctccagcacctctgaagttttgcagcgcccagaaaggaggcgaggaaggagggagtgtgtgagaggagggagcaaaaagctcaccctaaaacatttatttcaaggagaaaagaaaaagggggggcgcaaaaatggctggggcaattatagaaaacatgagcaccaagaagctgtgcattgttggtgggattctgctcgtgttccaaatcatcgcctttctggtgggaggcttgattgctccagggcccacaacggcagtgtcctacatgtcggtgaaatgtgtggatgcccgtaagaaccatcacaagacaaaatggttcgtgccttggggacccaatcattgtgacaagatccgagacattgaagaggcaattccaattcatgctgtttatcctgcagctggacattgccttcaagctaaacaaccaaatcagagaaaatgcagaagtctccatggacgtttccctggcttaccgtgatgacgcgtttgctgagtggactgaaatggcccatgaaagagtaccacggaaactcaaatgcaccttcacatctcccaagactccagagcatgagggccgttactatgaatgtgatgtccttcctttcatggaaattgggtctgtggcccataagttttaccttttaaacatccggctgcctgtgaatgagaagaagaaaatcaatgtgggaattggggagataaaggatatccggttggtggggatccaccaaaatggaggcttcaccaaggtgtggtttgccatgaagaccttccttacgcccagcatcttcatcattatggtgtggtattggaggaggatcaccatgatgtcccgacccccagtgcttctggaaaaagtcatctttgcccttgggatttccatgacctttatcaatatcccagtggaatggttttccatcgggtttgactggacctggatgctgctgtttggtgacatccgacagggcatcttctatgcgatgcttctgtccttctggatcatcttctgtggcgagcacatgatggatcagcacgagcggaaccacatcgcagggtattggaagcaagtcggacccattgccgttggctccttctgcctcttcatatttgacatgtgtgagagaggggtacaactcacgaatcccttctacagtatctggactacagacattggaacagagctggccatggccttcatcatcgtggctggaatctgcctctgcctctacttcctgtttctatgcttcatggtatttcaggtgtttcggaacatcagtgggaagcagtccagcctgccagctatgagcaaagtccggcggctacactatgaggggctaatttttaggttcaagttcctcatgcttatcaccttggcctgcgctgccatgactgtcatcttcttcatcgttagtcaggtaacggaaggccattggaaatggggcggcgtcacagtccaagtgaacagtgcctttttcacaggcatctatgggatgtggaatctgtatgtctttgctctgatgttcttgtatgcaccatcccataaaaactatggagaagaccagtccaatggaatgcaactcccatgtaaatcgagggaagattgtgctttgtttgtttcggaactttatcaagaattgttcagcgcttcgaaatattccttcatcaatgacaacgcagcttctggtatttgagtcaacaaggcaacacatgtttatcagctttgcatttgcagttgtcacagtcacattgattgtacttgtatacgcacacaaatacactcatttagcctttatctcaaaatgttaaatataaggaaaaaagcgtcaacaataaatattctttgagtatt

SEQ ID NO: 147 - protein, 460 aa, Homo sapiens
MPVRTITRQNGSCLGDPIIVTRSETLKRQFQGKLKPMTSCFLFTFPSPMDVSLAYRDDAFAEWTEMAHERVPRKLKCTFTSPKTPEHEGRYYECDVLPFMEIGSVAHKFYLLNIRLPVNEKKKINVGIGEIKDIRLVGIHQNGGFTKVWFAMKTFLTPSIFIIMVWYWRRITMMSRPPVLLEKVIFALGISMTFINIPVEWFSIGFDWTWMLLFGDIRQGIFYAMLLSFWIIFCGEHMMDQHERNHIAGYWKQVGPIAVGSFCLFIFDMCERGVQLTNPFYSIWTTDIGTELAMAFIIVAGICLCLYFLFLCFMVFQVFRNISGKQSSLPAMSKVRRLHYEGLIFRFKFLMLITLACAAMTVIFFIVSQVTEGHWKWGGITVQVNSAFFTGIYGMWNLYVFALMFLYAPSHKNYGEDQSNGMQLPCKSREDCALFVSELYQELFSASKYSFINDNAASGI

SEQ ID NO: 148 - DNA, 1919 bp, Homo sapiens
  CDS (376)..(1755)
atcacagctccgggcattgggggaacccgagccggctgcgccgggggaatccgtgcgggcgccttccgtcccggtcccatcctcgccgcgctccagcacctctgaagttttgcagcgcccagaaaggaggcgaggaaggagggagtgtatgagaggagggagcaaaaagctcaccctaaaacatttatttcaaggagaaaagaaaaagggggggcgcaaaaatggctggggcaattatagaaaacatgagcaccaagaagctgtgcattgttggtgggattctgctcgtgttccaaatcatcgcctttctggtgggaggcttgattgctccagggcccacaacggcagtgtcctacatgtcggtgaaatgtgtggatgcccgtaagaaccatcacaagacaaaatggttcgtgccttggggacccaatcattgtgacaagatccgagacattgaagaggcaattccaagggaaattgaagccaatgacatcgtgttttctgttcacattcccctcccccatggacgtttccctggcttaccgtgatgacgcgtttgctgagtggactgaaatggcccatgaaagagtaccacggaaactcaaatgcaccttcacatctcccaagactccagagcatgagggccgttactatgaatgtgatgtccttcctttcatggaaattgggtctgtggcccataagttttaccttttaaacatccggctgcctgtgaatgagaagaagaaaatcaatgtgggaattggggagataaaggatatccggttggtggggatccaccaaaatggaggcttcaccaaggtgtggtttgccatgaagaccttccttacgcccagcatcttcatcattatggtgtggtattggaggaggatcaccatgatgtcccgacccccagtgcttctggaaaaagtcatctttgcccttgggatttccatgacctttatcaatatcccagtggaatggttttccatcgggtttgactggacctggatgctgctgtttggtgacatccgacagggcatcttctatgcgatgcttctgtccttctggatcatcttctgtggcgagcacatgatggatcagcacgagcggaaccacatcgcagggtattggaagcaagtcggacccattgccgttggctccttctgcctcttcatatttgacatgtgtgagagaggggtacaactcacgaatcccttctacagtatctggactacagacattggaacagagctggccatggccttcatcatcgtggctggaatctgcctctgcctctacttcctgtttctatgcttcatggtatttcaggtgtttcggaacatcagtgggaagcagtccagcctgccagctatgagcaaagtccggcggctacactatgaggggctaatttttaggttcaagttcctcatgcttatcaccttggcctgcgctgccatgactgtcatcttcttcatcgttagtcaggtaacggaaggccattggaaatggggcggcatcacagtccaagtgaacagtgcctttttcacaggcatctatgggatgtggaatctgtatgtctttgctctgatgttcttgtatgcaccatcccataaaaactatggagaagaccagtccaatggaatgcaactcccatgtaaatcgagggaagattgtgctttgtttgtttcggaactttatcaagaattgttcagcgcttcgaaatattccttcatcaatgacaacgcagcttctggtatttgagtcaacaaggcaacacatgtttatcagctttgcatttgcagttgtcacagtcacattgattgtacttgtatacgcacacaaatacactcatttagcctttatctcaaaatgttaaatataaggaaaaaagcgtcaacaataaatattctttgagtattgtc

SEQ ID NO: 149 - protein, 183 aa, Homo sapiens
MKLLSLVAVVGCLLVPPAEANKSSEDIRCKCICPPYRNISGHIYNQNVSQKDCNCLHVVEPMPVPGHDVEAYCLLCECRYEERSTTTIKVIIVIYLSVVGALLLYMAFLMLVDPLIRKPDAYTEQLHNEEENEDARSMAAAAASLGGPRANTVLERVEGAQQRWKLQVQEQRKTVFDRHKMLS

SEQ ID NO: 150 - DNA, 1562 bp, Homo sapiens
  CDS (120)..(668)
tacggctgcgagaagacgacagaaggggattaagagggagggcggggacaactgggtcttttgcggctgcagcgggcttgtaggtgtccggctttgctggcccagcaagcctgataagcatgaagctcttatctttggtggctgtggtcgggtgtttgctggtgcccccagctgaagccaacaagagttctgaagatatccggtgcaaatgcatctgtccaccttatagaaacatcagtgggcacatttacaaccagaatgtatcccagaaggactgcaactgcctgcacgtggtggagcccatgccagtgcctggccatgacgtggaggcctactgcctgctgtgcgagtgcaggtacgaggagcgcagcaccaccaccatcaaggtcatcattgtcatctacctgtccgtggtgggtgccctgttgctctacatggccttcctgatgctggtggaccctctgatccgaaagccggatgcatatactgagcaactgcacaatgaggaggagaatgaggatgctcgctctatggcagcagctgctgcatccctcgggggaccccgagcaaacacagtcctggagcgtgtggaaggtgcccagcagcggtggaagctgcaggtgcaggagcagcggaagacagtcttcgatcggcacaagatgctcagctagatgggctggtgtggttgggtcaaggccccaacaccatggctgccagcttccaggctggacaaagcagggggctacttctcccttccctcggttccagtcttccctttaaaagcctgtggcatttttcctccttctccctaactttagaaatgttgtacttggctattttgattagggaagagggatgtggtctctgatctccgttgtcttcttgggtctttggggttgaagggagggggaaggcaggccagaagggaatggagacattcgaggcggcctcaggagtggatgcgatctgtctctcctggctccactcttgccgccttccagctctgagtcttgggaatgttgttacccttggaagataaagctgggtcttcaggaactcagtgtctgggaggaaagcatggcccagcattcagcatgtgttcctttctgcagtggttctttatcaccacctccctcccagccccagcgcctcagccccagccccagctccagccctgaggacagctctgatgggagagctgggccccctgagcccactgggtcttcagggtgcactggaagctggtgttcgctgtcccctgtgcacttctcgcactggggcatggagtgcccatgcatactctgctgccggtcccctcacctgcacttgaggggtctgggcagtccctcctctccccagtgtccacagtcactgagccagacggtcggttggaacatgagactcgaggctgagcgtggatctgaacaccacagcccctgtacttgggttgcctcttgtccctgaacttcgttgtaccagtgcatggagagaaaattttgtcctcttgtcttagagttgtgtgtaaatcaaggaagccatcattaaattgttttatttctctc

SEQ ID NO: 151 - DNA, 2815 bp, Mus musculus
  CDS (192)..(2387)
tctctcctcctcctccagcagccaccagggaccgggagatctaccagctcaagacccctacagccaggtctgtgctgccgccctccagcatctttgcagcaggggacgaggctgtgtgggaggctgtcggttcggaacatgtctccacccaccccaccctctgtggctccaggcttcattctcccccatccatggataacccagggccttcgctccgtggtgcctttggcattctaggtgccttggaaagggacaggctgacccacctgaaacacaagctggggagtctgtgttcaggcagccaggagtcaaagcttctccatgccatggtactcctggctctgggccaggacacggaggccagggtctctctggagtccttgaagatgaacacagtagcccagctggtagcccaccagtgggcagacatggagaccacagagggccctgaggagcctccagacttgtcctggacggtggctcgcctgtaccacctgctggctgaggagaacctgtgtccggcctctacaagggacatggcttaccaggtggcccttcgtgactttgcctcccagggtgaccaccagctgggccaactccagaatgaggcctgggatcggtgcagttcagatatcaagggggaccccagtggtttccagccactccattctcatcagggttccctgcagccaccttcagcatcccctgcagtgaccagaagccagcctcgtcccattgacacaccagactggagttggggacatacgttacactccaccaacagcactgcctcactggccagccacctagagatcagccagtcacccactcttgcctttctctcttcacaccatggaacccatgggcccagcaagctatgtaacacaccgctggacactcaggagcctcagcttgtccctgaaggctgccaagaacctgaggagataagctggcctccatcagtggagaccagtgtctccttagggttaccacacgaaattagcgttccagaggtgtctccagaggaggcttcgcccatcctccctgacgccctggctgctccagacacaagtgtccactgtcccattgaatgcacagagttgtctacaaactccaggtctcccctgacgtccaccacagaaagtgttggaaagcagtggcctattacaagtcagaggtcacctcaggttcctgtaggagatgattctctgcagaacaccacgtcatccagccctcctgcccagccaccatccctccaagcctcccctaagctgcctccttcccctctgtcctctgcttcctccccgagcagctaccctgctcctccaacctccacatcccctgttttggaccactcagaaacatctgatcagaaattctataactttgtggttatccatgccagggctgatgaacaggtggccctacgtattcgggagaagctggagaccctcggggtacctgacggggccaccttctgtgaggaatttcaggtgcccgggcgtggtgagctgcactgtctccaagatgccatcgatcactcggggttcacgatcctgctcctgactgctagctttgattgcagcctgagcctgcatcaaatcaaccatgctctcatgaacagccttacacagtctgggaggcaggactgtgtgatccccctcctcccacttgagtgttcccaggcccagctcagcccagatacaaccagactgctccacagcattgtgtggctggatgaacactccccaatcttcgccagaaaggtggcaaacaccttcaagacacagaagctccaggcacagcgggtacgctggaagaaagcgcaggaggccagaaccctcaaggagcagagcatacagctggaggcagagcggcaaaacgtggcagccatatctgctgcctacacagcctatgtccatagctatagggcctggcaagcagagatgaacaaacttggggtggcttttgggaagaacttgtcactggggactccaacacccagctggcccggatgtccacagccaataccttctcatcctcagggtggtactccagttttcccctattccccacagcctccatccttccctcagcctccatgcttccctcagcctccatccttccctcagcctccatccttcccactgcctccagtctcttccccacagtcccaatcctttccatcagcctcctccccagccccacagactccaggacctcagcctctcattattcaccatgcccagatggttcagctgggtgtcaacaatcacatgtggggccacacaggggcccagtcatctgatgacaagactgagtgttcggagaacccctgtatgggccctctgactgatcagggcgaaccccttcttgagactccagagtgaccaggttggaccccacctagatggctagagtgacaagattggacttcacctgggtccttaaaatgatagtggaggaagggaacctcgcctgggtccccagagtagccagaggacttagcttgggctcccacagtggctattagttggacccagcttgagaccccagaggcagggaagaccacacctataaatcaggcctgggaaacatgcagaaaccccatttgaacagactgtgggactccaatctgaatcctctatgtggacagaggatgatggggccagaggcacctctgaggtgccctcagcgcagcctcgtaaacttcattcactgtgacacatgctgttcatagggtctctctggggaggatgcggtcccggggcacatagggagggtcctgtttttataataaagttattgacaactg

SEQ ID NO: 152 - protein, 732 aa, Mus musculus
MDNPGPSLRGAFGILGALERDRLTHLKHKLGSLCSGSQESKLLHAMVLLALGQDTEARVSLESLKMNTVAQLVAHQWADMETTEGPEEPPDLSWTVARLYHLLAEENLCPASTRDMAYQVALRDFASQGDHQLGQLQNEAWDRCSSDIKGDPSGFQPLHSHQGSLQPPSASPAVTRSQPRPIDTPDWSWGHTLHSTNSTASLASHLEISQSPTLAFLSSHHGTHGPSKLCNTPLDTQEPQLVPEGCQEPEEISWPPSVETSVSLGLPHEISVPEVSPEEASPILPDALAAPDTSVHCPIECTELSTNSRSPLTSTTESVGKQWPITSQRSPQVPVGDDSLQNTTSSSPPAQPPSLQASPKLPPSPLSSASSPSSYPAPPTSTSPVLDHSETSDQKFYNFVVIHARADEQVALRIREKLETLGVPDGATFCEEFQVPGRGELHCLQDAIDHSGFTILLLTASFDCSLSLHQINHALMNSLTQSGRQDCVIPLLPLECSQAQLSPDTTRLLHSIVWLDEHSPIFARKVANTFKTQKLQAQRVRWKKAQEARTLKEQSIQLEAERQNVAAISAAYTAYVHSYRAWQAEMNKLGVAFGKNLSLGTPTPSWPGCPQPIPSHPQGGTPVFPYSPQPPSFPQPPCFPQPPSFPQPPSFPLPPVSSPQSQSFPSASSPAPQTPGPQPLIIHHAQMVQLGVNNHMWGHTGAQSSDDKTECSENPCMGPLTDQGEPLLETPE

SEQ ID NO: 153 - DNA, 2544 bp, Homo sapiens
  CDS (97)..(2232)
taggggacactgggcgtgcagaaggcggggggcagtgtggaacatgccttcaccacctccagcttctgctgccggaggctgcacccacctgtgcccatggcctgcacaggcccatcacttcctagcgccttcgacattctaggtgcagcaggccaggacaagctcttgtatctgaagcacaaactgaagaccccacgcccaggctgccaggggcaggacctcctgcatgccatggttctcctgaagctgggccaggaaactgaggccaggatctctctagaggcattgaaggccgatgcggtggcccggctggtggcccgccagtgggctggcgtggacagcaccgaggacccagaggagcccccagatgtgtcctgggctgtggcccgcttgtaccacctgctggctgaggagaagctgtgccccgcctcgctgcgggacgtggcctaccaggaagccgtccgcaccctcagctccagggacgaccaccggctgggggaacttcaggatgaggcccgaaaccggtgtgggtgggacattgctggggatccagggagcatccggacgctccagtccaatctgggctgcctcccaccatcctcggctttgccctctgggaccaggagcctcccacgccccattgacggtgtttcggactggagccaagggtgctccctgcgatccactggcagccctgcctccctggccagcaacttggaaatcagccagtcccctaccatgcccttcctcagcctgcaccgcagcccacatgggcccagcaagctctgtgacgacccccaggccagcttggtgcccgagcctgtccccggtggctgccaggagcctgaggagatgagctggccgccatcgggggagattgccagcccaccagagctgccaagcagcccacctcctgggcttcccgaagtggccccagatgcaacctccactggcctccctgatacccccgcagctccagaaaccagcaccaactacccagtggagtgcaccgaggggtctgcaggcccccagtctctccccttgcctattctggagccggtcaaaaacccctgctctgtcaaagaccagacgccactccaactttctgtagaagataccacctctccaaataccaagccgtgcccacctactcccaccaccccagaaacatcccctcctcctcctcctcctcctccttcatctactccttgttcagctcacctgaccccctcctccctgttcccttcctccctggaatcatcatcggaacagaaattctataactttgtgatcctccacgccagggcagacgaacacatcgccctgcgggttcgggagaagctggaggcccttggcgtgcccgacggggccaccttctgcgaggatttccaggtgccggggcgcggggagctgagctgcctgcaggacgccatagaccactcagctttcatcatcctacttctcacctccaacttcgactgtcgcctgagcctgcaccaggtgaaccaagccatgatgagcaacctcacgcgacaggggtcgccagactgtgtcatccccttcctgcccctggagagctccccggcccagctcagctccgacacggccagcctgctctccgggctggtgcggctggacgaacactcccagatcttcgccaggaaggtggccaacaccttcaagccccacaggcttcaggcccgaaaggccatgtggaggaaggaacaggacacccgagccctgcgggaacagagccaacacctggacggtgagcggatgcaggcggcggcactgaacgcagcctactcagcctacctccagagctacttgtcctaccaggcacagatggagcagctccaggtggcttttgggagccacatgtcatttgggactggggcgccctatggggctcgaatgccctttgggggccaggtgcccctgggagccccgccaccctttcccacttggccggggtgcccgcagccgccacccctgcacgcatggcaggctggcacccccccaccgccctccccacagccagcagcctttccacagtcactgcccttcccgcagtccccagccttccctacggcctcacccgcaccccctcagagcccagggctgcaacccctcattatccaccacgcacagatggtacagctggggctgaacaaccacatgtggaaccagagagggtcccaggcgcccgaggacaagacgcaggaggcagaatgaccgcgtgtccttgcctgaccacctggggaacacccctggacccaggcatcggccaggaccccatagagcaccccggtctgccctgtgccctgtggacagtggaagatgaggtcatctgccactttcaggacattgtccgggagcccttcatttaggacaaaacgggcgcgatgatgccctggctttcagggtggtcagaactggatacggtgtttacaattccaatctctctatttctgggtgaagggtcttggtggtgggggtattgctacggtcttttaattataataaatatttattgaatgcttc

SEQ ID NO: 154 - protein, 712 aa, Homo sapiens
MACTGPSLPSAFDILGAAGQDKLLYLKHKLKTPRPGCQGQDLLHAMVLLKLGQETEARISLEALKADAVARLVARQWAGVDSTEDPEEPPDVSWAVARLYHLLAEEKLCPASLRDVAYQEAVRTLSSRDDHRLGELQDEARNRCGWDIAGDPGSIRTLQSNLGCLPPSSALPSGTRSLPRPIDGVSDWSQGCSLRSTGSPASLASNLEISQSPTMPFLSLHRSPHGPSKLCDDPQASLVPEPVPGGCQEPEEMSWPPSGEIASPPELPSSPPPGLPEVAPDATSTGLPDTPAAPETSTNYPVECTEGSAGPQSLPLPILEPVKNPCSVKDQTPLQLSVEDTTSPNTKPCPPTPTTPETSPPPPPPPPSSTPCSAHLTPSSLFPSSLESSSEQKFYNFVILHARADEHIALRVREKLEALGVPDGATFCEDFQVPGRGELSCLQDAIDHSAFIILLLTSNFDCRLSLHQVNQAMMSNLTRQGSPDCVIPFLPLESSPAQLSSDTASLLSGLVRLDEHSQIFARKVANTFKPHRLQARKAMWRKEQDTRALREQSQHLDGERMQAAALNAAYSAYLQSYLSYQAQMEQLQVAFGSHMSFGTGAPYGARMPFGGQVPLGAPPPFPTWPGCPQPPPLHAWQAGTPPPPSPQPAAFPQSLPFPQSPAFPTASPAPPQSPGLQPLIIHHAQMVQLGLNNHMWNQRGSQAPEDKTQEAE

SEQ ID NO: 155 - DNA, 3456 bp, Homo sapiens
  CDS (281)..(3016)
agcattcaaggagctccccaggagaaagagcaagttctgaggagccctctgagcccggaacgtgtccacccggtcatgcccgccgcgcaccagccccgcagtggacttggaggaggaggaggaggagagctctgtggatggcaaaggggaccggaagagcacaggcctgaaactctccaagaagaaagcaaggaggagacacacggatgacccaagcaaggaatgcttcactctgaaatttgacctgaatgtggacattgagacagagatcgtcccagccatgaagaagaagtcactgggggaggtgctgctgcctgtatttgaaaggaagggcattgcgctgggcaaagtggacatctacctggaccagtccaacacacccctgtccctcaccttcgaggcctacaggttcgggggacactaccttcgtgtcaaagccccagccaagcctggagatgagggcaaggtggagcagggcatgaaggactccaagtccctgagtttgccgattctgcggccagctgggaccgggccccccgccctggagcgtgtggacgcccagagccgccgggagagcctggacatcttggcccctggccgccgccgcaagaacatgtcggagttcctgggggaggcgagcatccccgggcaggagccccccacgccctccagctgctctctgcccagcggcagcagtggcagcaccaacactggcgacagctggaagaaccgggcggccagtcgcttcagcggctttttcagctccggccccagcaccagcgcctttggccgggaggtagacaagatggagcagctggagggcaagctgcacacctacagcctcttcgggctgcccaggctgccccgggggctgcgcttcgaccatgactcctgggaggaggagtacgatgaagacgaggatgaggacaatgcctgcctgaggctggaggacagctggcgggagctcattgatgggcatgagaagctgacccggcggcagtgccaccagcaggaggcggtgtgggagctgctgcacacggaggcctcctacatcaggaaactgcgggtgatcatcaacctgttcttgtgctgcctcctgaacctgcaagagtcagggctgctgtgtgaggtggaggcggagcgcctgttcagcaacatcccggagatcgcgcagctgcaccgcaggctgtgggctagcgtgatggcgccggtgctggagaaggcgcggcgcacgcgagcgctgctacagcccggggacttcctcaaaggcttcaagatgttcggctcgctcttcaagccctacatccgctactgcatggaggaggagggctgcatggagtacatgcgcggcctgctgcgcgacaacgacctcttccgggcctacatcacgtgggcggagaagcacccacagtgccagaggctgaagctgagcgacatgctggccaaaccccaccagcggctcaccaagtacccgctgctgctcaagtcggtgctgaggaagaccgaggagccgcgcgccaaggaggccgtcgtcgccatgatcggctccgtggagcgcttcatccaccacgtgaacgcgtgcatgcggcagcggcaggagcggcagcggctggcggccgtggtgagccgcatcgacgcctacgaggtggtggaaagcagcagcgacgaagtggacaagctcctgaaggaatttctgcacctggacttgacagcgcccatccctggcgcctccccggaggagacgcggcagctgctgctggaggggagcctgaggatgaaggaggggaaggacagcaagatggatgtgtactgcttcctcttcacggatctgctgttggtgaccaaagcagtgaagaaggcagagaggaccagggtcatcaggccacccctgctcgtggacaagattgtgtgccgggagctacgggaccctgggtccttcctccttatctacctgaatgagtttcacagtgctgtaggggcctacacgttccaggccagtggccaggccttgtgccgtggctgggtggacaccatttacaatgcccagaaccagctgcaacagctgcgtgcacaggagcccccaggcagtcagcagcccctgcagagcctggaagaggaggaggatgagcaggaggaggaagaggaggaggaggaggaggaggaggaaggcgaggacagtggcacttcagctgccagctcccctaccatcatgcggaaaagcagcggcagccccgactctcagcactgtgcctcagatggctccacggagaccctggccatggttgtggtagagcctggggacacgctgtcctcccccgagttcgacagcggtcctttcagctcccagtctgatgagacctctctcagcaccactgcctcatctgccacgcccaccagtgagctgctgcccctgggtccggtggacggccgctcctgctccatggactctgcctacggcaccctctccccaacctccttacaagactttgtggccccaggcccaatggcagagctagtgcctcgggccccagagtccccacgagttccttcccctccaccctcgccccgtctccgccgccgcacccctgtccagctgttgagctgcccgccccacctgctcaagtctaagtccgaggccagcctcctccagctgctggcaggggctggcacccatgggacaccctctgcccccagccgcagcctgtcagagctctgcctggctgttccagccccaggtattaggactcagggctcccctcaggaagctgggcccagctgggattgccgaggggcccctagccctggcagcggtcctgggctagtcggctgcctggccggggaacctgcaggctcccacaggaagaggtgtggagacctgccctcgggggcctctcccagggtccagcctgagcccccaccaggggtctctgcccagcacaggaagctgaccctggcccagctctaccgaatcaggaccaccctgctgcttaactccacgctcactgcctcggaggtctgagcagagggaggcccccaagagtgccattgaccaagagacagcagacagcctgcctcctggggcgtgccggcacctgcttcagctactgcctcctgtatgcatgagccggatgctgggcaggatccctgcctacgcccgggcccgatttgcgctttgccggactggatggagtggaggaggcccaggccacagtaccaccccacctgcccaggcagcccctcgtcacctactccccgaagttaccagctcagctcgagtcttcagggctgggctcctaggctgcccatcctacttctaccctcactggcctccagtgggattcactcctgccctgcccccaccttcccagtcccacaggccacccctggcttgggctgggttctgtgaagttacgtatttattgagcttttggttcttttataaagacttgtctagac

SEQ ID NO: 156 - protein, 912 aa, Homo sapiens
MKKKSLGEVLLPVFERKGIALGKVDIYLDQSNTPLSLTFEAYRFGGHYLRVKAPAKPGDEGKVEQGMKDSKSLSLPILRPAGTGPPALERVDAQSRRESLDILAPGRRRKNMSEFLGEASIPGQEPPTPSSCSLPSGSSGSTNTGDSWKNRAASRFSGFFSSGPSTSAFGREVDKMEQLEGKLHTYSLFGLPRLPRGLRFDHDSWEEEYDEDEDEDNACLRLEDSWRELIDGHEKLTRRQCHQQEAVWELLHTEASYIRKLRVIINLFLCCLLNLQESGLLCEVEAERLFSNIPEIAQLHRRLWASVMAPVLEKARRTRALLQPGDFLKGFKMFGSLFKPYIRYCMEEEGCMEYMRGLLRDNDLFRAYITWAEKHPQCQRLKLSDMLAKPHQRLTKYPLLLKSVLRKTEEPRAKEAVVAMIGSVERFIHHVNACMRQRQERQRLAAVVSRIDAYEVVESSSDEVDKLLKEFLHLDLTAPIPGASPEETRQLLLEGSLRMKEGKDSKMDVYCFLFTDLLLVTKAVKKAERTRVIRPPLLVDKIVCRELRDPGSFLLIYLNEFHSAVGAYTFQASGQALCRGWVDTIYNAQNQLQQLRAQEPPGSQQPLQSLEEEEDEQEEEEEEEEEEEEGEDSGTSAASSPTIMRKSSGSPDSQHCASDGSTETLAMVVVEPGDTLSSPEFDSGPFSSQSDETSLSTTASSATPTSELLPLGPVDGRSCSMDSAYGTLSPTSLQDFVAPGPMAELVPRAPESPRVPSPPPSPRLRRRTPVQLLSCPPHLLKSKSEASLLQLLAGAGTHGTPSAPSRSLSELCLAVPAPGIRTQGSPQEAGPSWDCRGAPSPGSGPGLVGCLAGEPAGSHRKRCGDLPSGASPRVQPEPPPGVSAQHRKLTLAQLYRIRTTLLLNSTLTASEV

SEQ ID NO: 157 - DNA, 3609 bp, Homo sapiens
  CDS (152)..(3169)
agatgaagaccagggagaggaaagggtggacctgaggcccccatggagaagggacgggcaggatgtatgtcaccacgccgactgccagcagctgcaccgccgggggcccctcaacctctgcgaggcctgtgacagcaagttccacagcaccatgcattatgatgggcatgtccgcttcgaccttcccccacaaggctctgtgctggcccggaacgtgtccacccggtcatgcccgccgcgcaccagccccgcagtggacttggaggaggaggaggaggagagctctgtggatggcaaaggggaccggaagagcacaggcctgaaactctccaagaagaaagcaaggaggagacacacggatgacccaagcaaggaatgcttcactctgaaatttgacctgaatgtggacattgagacagagatcgtcccagccatgaagaagaagtcactgggggaggtgctgctgcctgtatttgaaaggaagggcattgcgctgggcaaagtggacatctacctggaccagtccaacacacccctgtccctcaccttcgaggcctacaggttcgggggacactaccttcgtgtcaaagccccagccaagcctggagatgagggcaaggtggagcagggcatgaaggactccaagtccctgagtttgccgattctgcggccagctgggaccgggccccccgccctggagcgtgtggacgcccagagccgccgggagagcctggacatcttggcccctggccgccgccgcaagaacatgtcggagttcctgggggaggcgagcatccccgggcaggagccccccacgccctccagctgctctctgcccagcggcagcagtggcagcaccaacactggcgacagctggaagaaccgggcggccagtcgcttcagcggctttttcagctccggccccagcaccagcgcctttggccgggaggtagacaagatggagcagctggagggcaagctgcacacctacagcctcttcgggctgcccaggctgccccgggggctgcgcttcgaccatgactcctgggaggaggagtacgatgaagacgaggatgaggacaatgcctgcctgaggctggaggacagctggcgggagctcattgatgggcatgagaagctgacccggcggcagtgccaccagcaggaggcggtgtgggagctgctgcacacggaggcctcctacatcaggaaactgcgggtgatcatcaacctgttcctgtgctgcctcctgaacctgcaagagtcagggctgctgtgtgaggtggaggcggagcgcctgttcagcaacatcccggagatcgcgcagctgcaccgcaggctgtgggctagcgtgatggcgccggtgctggagaaggcgcggcgcacgcgagcgctgctacagcccggggacttcctcaaaggcttcaagatgttcggctcgctcttcaagccctacatccgctactgcatggaggaggagggctgcatggagtacatgcgcggcctgctgcgcgacaacgacctcttccgggcctacatcacgtgggcggagaagcacccacagtgccagaggctgaagctgagcgacatgctggccaaaccccaccagcggctcaccaagtacccgctgctgctcaagtcggtgctgaggaagaccgaggagccgcgcgccaaggaggccgtcgtcgccatgatcggctccgtggagcgcttcatccaccacgtgaacgcgtgcatgcggcagcggcaggagcggcagcggctggcggccgtggtgagccgcatcgacgcctacgaggtggtggaaagcagcagcgacgaagtggacaagctcctgaaggaatttctgcacctggacttgacagcgcccatccctggcgcctccccggaggagacgcggcagctgctgctggaggggagcctgaggatgaaggaggggaaggacagcaagatggatgtgtactgcttcctcttcacggatctgctgttggtgaccaaagcagtgaagaaggcagagaggaccagggtcatcaggccacccctgctcgtggacaagattgtgtgccgggagctacgggaccctgggtccttcctccttatctacctgaatgagtttcacagtgctgtaggggcctacacgttccaggccagtggccaggccttgtgccgtggctgggtggacaccatttacaatgcccagaaccagctgcaacagctgcgtgcacaggagcccccaggcagtcagcagcccctgcagagcctggaagaggaggaggatgagcaggaggaggaagaggaggaggaggaggaggaggaggaaggcgaggacagtggcacttcagctgccagctcccctaccatcatgcggaaaagcagcggcagccccgactctcagcactgtgcctcagatggctccacggagaccctggccatggttgtggtagagcctggggacacgctgtcctcccccgagttcgacagcggtcctttcagctcccagtctgatgagacctctctcagcaccactgcctcatctgccacgcccaccagtgagctgctgcccctgggtccggtggacggccgctcctgctccatggactctgcctacggcaccctctccccaacctccttacaagactttgtggccccaggcccaatggcagagctagtgcctcgggccccagagtccccacgagttccttcccctccaccctcgccccgtctccgccgccgcacccctgtccagctgttgagctgcccgccccacctgctcaagtctaagtccgaggccagcctcctccagctgctggcaggggctggcacccatgggacaccctctgcccccagccgcagcctgtcagagctctgcctggctgttccagccccaggtattaggactcagggctcccctcaggaagctgggcccagctgggattgccgaggggcccctagccctggcagcggtcctgggctagtcggctgcctggccggggaacctgcaggctcccacaggaagaggtgtggagacctgccctcgggggcctctcccagggtccagcctgagcccccaccaggggtctctgcccagcacaggaagctgaccctggcccagctctaccgaatcaggaccaccctgctgcttaactccacgctcactgcctcggaggtctgagcagagggaggcccccaagagtgccattgaccaagagacagcagacagcctgcctcctggggcgtgccggcacctgcttcagctactgcctcctgtatgcatgagccggatgctgggcaggatccctgcctacgcccgggcccgatttgcgctttgccggactggatggagtggaggaggcccaggccacagtaccaccccacctgcccaggcagcccctcgtcacctactccccgaagttaccagctcagctcgagtcttcagggctgggctcctaggctgcccatcctacttctaccctcactggcctccagtgggattcactcctgccctgcccccaccttcccagtcccacaggccacccctggcttgggctgggttctgtgaagttacgtatttattgagcttttggttcttttataaagacttgtctagac

SEQ ID NO: 158 - protein, 1006 aa, Homo sapiens
MHYDGHVRFDLPPQGSVLARNVSTRSCPPRTSPAVDLEEEEEESSVDGKGDRKSTGLKLSKKKARRRHTDDPSKECFTLKFDLNVDIETEIVPAMKKKSLGEVLLPVFERKGIALGKVDIYLDQSNTPLSLTFEAYRFGGHYLRVKAPAKPGDEGKVEQGMKDSKSLSLPILRPAGTGPPALERVDAQSRRESLDILAPGRRRKNMSEFLGEASIPGQEPPTPSSCSLPSGSSGSTNTGDSWKNRAASRFSGFFSSGPSTSAFGREVDKMEQLEGKLHTYSLFGLPRLPRGLRFDHDSWEEEYDEDEDEDNACLRLEDSWRELIDGHEKLTRRQCHQQEAVWELLHTEASYIRKLRVIINLFLCCLLNLQESGLLCEVEAERLFSNIPEIAQLHRRLWASVMAPVLEKARRTRALLQPGDFLKGFKMFGSLFKPYIRYCMEEEGCMEYMRGLLRDNDLFRAYITWAEKHPQCQRLKLSDMLAKPHQRLTKYPLLLKSVLRKTEEPRAKEAVVAMIGSVERFIHHVNACMRQRQERQRLAAVVSRIDAYEVVESSSDEVDKLLKEFLHLDLTAPIPGASPEETRQLLLEGSLRMKEGKDSKMDVYCFLFTDLLLVTKAVKKAERTRVIRPPLLVDKIVCRELRDPGSFLLIYLNEFHSAVGAYTFQASGQALCRGWVDTIYNAQNQLQQLRAQEPPGSQQPLQSLEEEEDEQEEEEEEEEEEEEGEDSGTSAASSPTIMRKSSGSPDSQHCASDGSTETLAMVVVEPGDTLSSPEFDSGPFSSQSDETSLSTTASSATPTSELLPLGPVDGRSCSMDSAYGTLSPTSLQDFVAPGPMAELVPRAPESPRVPSPPPSPRLRRRTPVQLLSCPPHLLKSKSEASLLQLLAGAGTHGTPSAPSRSLSELCLAVPAPGIRTQGSPQEAGPSWDCRGAPSPGSGPGLVGCLAGEPAGSHRKRCGDLPSGASPRVQPEPPPGVSAQHRKLTLAQLYRIRTTLLLNSTLTASEV

SEQ ID NO: 159 - DNA, 3168 bp, Homo sapiens
  CDS (93)..(3089)
agtgcccggtggcccaggagggcctgggagcccgaagccgtccccgagtcgctcctaggtcactggcgcgatgcgggccgtcctctcggctgatgggttggaagcccagcgaggctagaggccagtcccaaagtctccaggcatcagggctgcagcccaggagcctcaaggcggcccggcgggcgactggacggccggacaggtcccgagcagccccgcccaacatggacccagacccccaggcgggcgtgcaggtgggcatgcgggtggtgcgcggcgtggactggaagtggggccagcaggacggcggcgagggcggcgtgggcacggtggtggagcttggccgccacggcagcccctcgacacccgaccgcacagtggtcgtgcagtgggaccagggcacgcgcaccaactaccgcgccggctaccagggcgcgcacgacctgctgctgtacgacaacgcccagatcggcgtccggcaccccaacatcatctgtgactgctgcaagaagcacgggctgcgggggatgcgctggaagtgccgtgtgtgcctggactacgacctctgcacgcagtgctacatgcacaacaagcatgagctcgcccacgccttcgaccgctacgagaccgctcactcgcgccctgtcacactgagtccccgccagggcctcccgaggatcccactaaggggcatcttccagggagcgaaggtggtgcgaggccccttctgggagtggggctcacaggatggaggggaagggaaaccgggccgtgtggtggacatccgtggctgggatgtggagacaggccggagtgtggccagcgtgacgtgggctgatggtaccaccaatgtgtaccgtgtgggccacaagggcaaggtggacctcaagtgtgtgggcgaggcagcgggcggcttctactacaaggaccacctcccaaggctcggcaagccggcggagctgcagcgcagggtgagtgctgacagccagcccttccagcacggggacaaggtcaagtgtctgctggacactgatgtcctgcgggagatgcaggaaggccacggcggctggaaccccaggatggcggagtttatcggacagacgggcaccgtgcatcgtatcacggaccgcggggacgtgcgcgtgcagttcaaccacgagacgcgctggaccttccaccccggggcgctcaccaagcaccactccttctgggtgggcgacgtggtccgggtcatcggcgaccttgacacagtgaagcggctgcaggctgggcatggcgagtggacggacgacatggcccctgccctgggccgcgtcgggaaggtggtgaaagtgtttggagacgggaacctgcgtgtagcagtcgctggtcagcggtggaccttcagcccctcctgcctggtggcctaccggcccgaggaggatgccaacctggacgtggccgagcgcgcccgggagaacaaaagctcactgagcgtggccctggacaagcttcgggcccagaagagtgacccagagcacccgggaaggctggtggtggaggtggcgctgggtaacgcagcccgggctctggacctgctgcggaggcgcccagagcaagtggacaccaagaaccaaggcaggaccgctctgcaagtggctgcctacctgggccaggtggagttgatacggctgctgctacaagccagggcgggcgtggacctgccggacgacgagggcaacacggcactgcactacgcggccctggggaaccagcccgaggccaccagggtgctcctgagtgctgggtgccgggcggacgccatcaacagcacccagagcacagcactgcacgtggccgtgcagaggggcttcctggaggtggtgcgggccctgtgtgagcgcggctgtgacgtcaacctgcccgacgcccactcggacacgcccctgcactccgccatctcggcgggcactggagccagcggcattgtcgaggtcctcacggaggtgccaaacatcgatgttaccgccaccaacagccagggtttcaccctgctgcaccatgcctccctcaagggtcacgcgctagctgtgagaaagattctggctcgggcgcggcagctggtggacgccaagaaggaggacggcttcacggcgctgcatctggctgccctcaacaaccaccgcgaggtggcccagatcctcatccgggagggccgctgtgacgtgaacgtgcgcaaccggaagctgcagtccccgctgcatctcgccgtgcaacaggcccacgtggggctggtgccgctactggtggacgctgggtgcagtgtcaacgccgaggacgaggagggggacacagccctgcacgtggcgctgcagcgtcatcagctgctgcccctggtggctgatggggccgggggggacccagggcccttgcagctgctgtccaggctacaggcctcgggcctccccggcagcgcggagctgacggtgggcgcggcggtcgcctgcttcctggcgctggagggcgccgacgtgagctacaccaaccaccgcggtcggagcccgctggacctggccgccgagggtcgcgtgctcaaggcccttcagggctgcgcccagcgcttccgggagcggcaggcgggcgggggcgcggccccgggccccaggcaaacgctcgggacccccaacaccgtgacgaacctgcacgtgggcgccgcgccggggcccgaggccgctgagtgcctggtgtgctccgagctggcgctgctggtgctgttctcgccgtgccagcaccgcaccgtgtgtgaggagtgcgcgcgcaggatgaagaagtgcatcaggtgccaggtggtcgtcagcaagaaactgcgcccagacggctctgaggtggcgagcgccgcccccgcccccggcccgccgcgccagctggtggaggagctgcagagccgctaccggcagatggaggaacgcatcacctgccccatctgcatcgacaggcacatccgcctcgtgttccagtgcggccacggcgcatgcgccccctgcggctccgcgctcagcgcctgccccatctgccgccagcccatccgcgaccgcatccagatcttcgtgtgagccgcgccgtccgccgcgcccgagctgccttcgcgtgcccccgccctgtgttttataaaaagaaagattctcggat

SEQ ID NO: 160 - protein, 999 aa, Homo sapiens [sequence omitted]

SEQ ID NO: 161 - DNA, 3168 bp, Homo sapiens
  CDS (93)..(3089)
agtgcccggtggcccaggagggcctgggagcccgaagccgtccccgagtcgctcctaggtcactggcgcgatgcgggccgtcctctcggctgatgggttggaagcccagcgaggctagaggccagtcccaaagtctccaggcatcagggctgcagcccaggagcctcaaggcggcccggcgggcgactggacggccggacaggtcccgagcagccccgcccaacatggacccagacccccaggcgggcgtgcaggtgggcatgcgggtggtgcgcggcgtggactggaagtggggccagcaggacggcggcgagggcggcgtgggcacggtggtggagcttggccgccacggcagcccctcgacacccgaccgcacagtggtcgtgcagtgggaccagggcacgcgcaccaactaccgcgccggctaccagggcgcgcacgacctgctgctgtacgacaacgcccagatcggcgtccggcaccccaacatcatctgtgactgctgcaagaagcacgggctgcgggggatgcgctggaagtgccgtgtgtgcctggactacgacctctgcacgcagtgctacatgcacaacaagcatgagctcgcccacgccttcgaccgctacgagaccgctcactcgcgccctgtcacactgagtccccgccagggcctcccgaggatcccactaaggggcatcttccagggagcgaaggtggtgcgaggccccttctgggagtggggctcacaggatggaggggaagggaaaccgggccgtgtggtggacatccgtggctgggatgtggagacaggccggagtgtggccagcgtgacgtgggctgatggtaccaccaatgtgtaccgtgtgggccacaagggcaaggtggacctcaagtgtgtgggcgaggcagcgggcggcttctactacaaggaccacctcccaaggctcggcaagccggcggagctgcagcgcagggtgagtgctgacagccagcccttccagcacggggacaaggtcaagtgtctgctggacactgatgtcctgcgggagatgcaggaaggccacggcggctggaaccccaggatggcggagtttatcggacagacgggcaccgtgcatcgtatcacggaccgcggggacgtgcgcgtgcagttcaaccacgagacgcgctggaccttccaccccggggcgctcaccaagcaccactccttctgggtgggcgacgtggtccgggtcatcggcgaccttgacacagtgaagcggctgcaggctgggcatggcgagtggacggacgacatggcccctgccctgggccgcgtcgggaaggtggtgaaagtgtttggagacgggaacctgcgtgtagcagtcgctggtcagcggtggaccttcagcccctcctgcctggtggcctaccggcccgaggaggatgccaacctggacgtggccgagcgcgcccgggagaacaaaagctcactgagcgtggccctggacaagcttcgggcccagaagagtgacccagagcacccgggaaggctggtggtggaggtggcgctgggtaacgcagcccgggctctggacctgctgcggaggcgcccagagcaagtggacaccaagaaccaaggcaggaccgctctgcaagtggctgcctacctgggccaggtggagttgatacggctgctgctacaagccagggcgggcgtggacctgccggacgacgagggcaacacggcactgcactacgcggccctggggaaccagcccgaggccaccagggtgctcctgagtgctgggtgccgggcggacgccatcaacagcacccagagcacagcactgcacgtggccgtgcagaggggcttcctggaggtggtgcgggccctgtgtgagcgcggctgtgacgtcaacctgcccgacgcccactcggacacgcccctgcactccgccatctcggcgggcactggagccagcggcattgtcgaggtcctcacggaggtgccaaacatcgatgttaccgccaccaacagccagggtttcaccctgctgcaccatgcctccctcaagggtcacgcgctagctgtgagaaagattctggctcgggcgcggcagctggtggacgccaagaaggaggacggcttcacggcgctgcatctggctgccctcaacaaccaccgcgaggtggcccagatcctcatccgggagggccgctgtgacgtgaacgtgcgcaaccggaagctgcagtccccgctgcatctcgccgtgcaacaggcccacgtggggctggtgccgctactggtggacgctgggtgcagtgtcaacgccgaggacgaggagggggacacagccctgcacgtggcgctgcagcgtcatcagctgctgcccctggtggctgatggggccgggggggacccagggcccttgcagctgctgtccaggctacaggcctcgggcctccccggcagcgcggagctgacggtgggcgcggcggtcgcctgcttcctggcgctggagggcgccgacgtgagctacaccaaccaccgcggtcggagcccgctggacctggccgccgagggtcgcgtgctcaaggcccttcagggctgcgcccagcgcttccgggagcggcaggcgggcgggggcgcggccccgggccccaggcaaacgctcgggacccccaacaccgtgacgaacctgcacgtgggcgccgcgccggggcccgaggccgctgagtgcctggtgtgctccgagctggcgctgctggtgctgttctcgccgtgccagcaccgcaccgtgtgtgaggagtgcgcgcgcaggatgaagaagtgcatcaggtgccaggtggtcgtcagcaagaaactgcgcccagacggctctgaggtggcgagcgccgcccccgcccccggcccgccgcgccagctggtggaggagctgcagagccgctaccggcagatggaggaacgcatcacctgccccatctgcatcgacagccacatccgcctcgtgttccagtgcggccacggcgcatgcgccccctgcggctccgcgctcagcgcctgccccatctgccgccagcccatccgcgaccgcatccagatcttcgtgtgagccgcgccgtccgccgcgcccgagctgccttcgcgtgcccccgccctgtgttttataaaaagaaagattctcggat

SEQ ID NO: 162 - protein, 999 aa, Homo sapiens
MGWKPSEARGQSQSLQASGLQPRSLKAARRATGRPDRSRAAPPNMDPDPQAGVQVGMRVVRGVDWKWGQQDGGEGGVGTVVELGRHGSPSTPDRTVVVQWDQGTRTNYRAGYQGAHDLLLYDNAQIGVRHPNIICDCCKKHGLRGMRWKCRVCLDYDLCTQCYMHNKHELAHAFDRYETAHSRPVTLSPRQGLPRIPLRGIFQGAKVVRGPFWEWGSQDGGEGKPGRVVDIRGWDVETGRSVASVTWADGTTNVYRVGHKGKVDLKCVGEAAGGFYYKDHLPRLGKPAELQRRVSADSQPFQHGDKVKCLLDTDVLREMQEGHGGWNPRMAEFIGQTGTVHRITDRGDVRVQFNHETRWTFHPGALTKHHSFWVGDVVRVIGDLDTVKRLQAGHGEWTDDMAPALGRVGKVVKVFGDGNLRVAVAGQRWTFSPSCLVAYRPEEDANLDVAERARENKSSLSVALDKLRAQKSDPEHPGRLVVEVALGNAARALDLLRRRPEQVDTKNQGRTALQVAAYLGQVELIRLLLQARAGVDLPDDEGNTALHYAALGNQPEATRVLLSAGCRADAINSTQSTALHVAVQRGFLEVVRALCERGCDVNLPDAHSDTPLHSAISAGTGASGIVEVLTEVPNIDVTATNSQGFTLLHHASLKGHALAVRKILARARQLVDAKKEDGFTALHLAALNNHREVAQILIREGRCDVNVRNRKLQSPLHLAVQQAHVGLVPLLVDAGCSVNAEDEEGDTALHVALQRHQLLPLVADGAGGDPGPLQLLSRLQASGLPGSAELTVGAAVACFLALEGADVSYTNHRGRSPLDLAAEGRVLKALQGCAQRFRERQAGGGAAPGPRQTLGTPNTVTNLHVGAAPGPEAAECLVCSELALLVLFSPCQHRTVCEECARRMKKCIRCQVVVSKKLRPDGSEVASAAPAPGPPRQLVEELQSRYRQMEERITCPICIDSHIRLVFQCGHGACAPCGSALSACPICRQPIRDRIQIFV

SEQ ID NO: 163 - DNA, 4031 bp, Mus musculus
  CDS (91)..(2649)
gttctggtcccggtgagatgctggaagctgctgcggcagccgcaacgcgcccggtcgccgtcccgtcgccaatccccgccgtcccgggccatgatcgcctggcgtctgcccttgtgcgtgctcttggtggcctccgtcgagagccacctgggggccctggggcccaagaacgtctcgcagaaagacgcggagtttgagcgcacctacgcggacgacgtcaacagcgagctggtcaacatctacaccttcaaccacaccgtgacccgcaaccggaccgagggtgtgcgagtgtctgtgaatgtcctgaacaagcagaaaggggcgcctttgctgttcgtggtccgccagaaggaggctgttgtgtccttccaggtgcccctaatccttcgaggactgtatcagcggaagtacctctaccaaaaagtggaacgaactctgtgtcagccccccaccaagaatgagtctgagatccagtttttctatgtggacgtgtctaccctgtcacccgtcaataccacttaccagctccgagtcaaccgtgtggacaattttgtgctcaggactggagagctgtttacctttaataccactgcagcccagccccagtacttcaaatacgagtttcctgatggtgtggactcggtaattgtcaaggtgacctccaagaaggccttcccctgctcagtcatctccatccaggatgtcctgtgccctgtctatgatctggacaacagtgtagccttcattggcatgtaccagacgatgactaagaaggcagccatcactgtgcagcggaaagacttccccagcaacagcttctatgtggtggtggtagtgaagactgaggaccaggcctgcggagggtccttgcccttctacccttttgtggaagatgagccagtggatcaagggcaccgtcagaaaacactgtcagtgctggtctctcaggctgtcacatctgaggcctatgttggtgggatgctcttttgcctgggcatattcttgtccttctacctgctgactgtgctgctggcctgttgggagaactggaggcaaaggaagaagaccttgctggtggccatagaccgagcctgcccagaaagtggtcacgctcgggtcttggctgattcatttcctggcagtgccccttacgagggttacaactatggctcctttgaaaatggttccggatccactgacgggttggttgaaagcgcaggttcaggggacctctcctacagttaccaggggcacgaccagttcaagcggcgccttccctctggccagatgcggcagctgtgcattgccatggaccgctcctttgacgcagtgggtcctcggcctcgactggactccatgagctccgtggaagaggatgactacgacacgctgactgacatcgactcagacaaaaacgtcattcgaaccaagcaatacctctgtgtggctgatctggcacgaaaggacaaacgtgttttgcggaaaaagtaccagatttacttctggaacatagccaccattgcggtcttctacgcacttcctgtggtgcagctggtgatcacctaccagacggtggtgaatgtcacagggaaccaggacatctgctactacaacttcctctgtgcccacccgctgggcaacctcagcgccttcaacaacatcctcagcaacttggggtacatcctgctggggctgctcttcctgctcatcatcctgcagcgagagatcaatcataaccgggccctgctgcggaatgacctctatgctctggagtgtgggatccccaaacactttggtctgttttacgccatgggcacagcactgatgatggaggggctacttagtgcctgttaccacgtctgccccaactacaccaacttccagtttgatacctccttcatgtacatgattgctggcctctgcatgctgaagctctaccagaagcggcacccagatatcaacgccagtgcctacagtgcatatgcctgcttggccatcgtcatcttcttctccgttctgggcgtggtgtttggcaaagggaacacggccttctggattgtcttctccgtcattcacatcatctccaccctgctcctcagcactcagctctattacatgggccgctggaagctggacttcgggatcttccgccgcatcctccatgtgctctacacagactgcatccggcagtgcagcgggcccctttacacggaccgcatggtgcttctggtcatgggcaacattatcaactggtcgctggctgcatacggactcatcatgcgccccaatgactttgcttcctacttgctggcaattggcatctgcaacctgctgctttatttcgccttctacatcatcatgaagctccggagcggcgagaggatcaagctcatccctctgctttgcatcgtctgcacctccgtggtctggggcttcgcgctcttcttcttcttccagggactgagcacgtggcagaaaacccccgcagagtccagggagcacaaccgcgactgcatcctcctcgacttctttgatgaccacgatatctggcacttcctgtcctccattgccatgtttgggtccttcctggttttgctgacgttggatgacgacttggacacagtacagcgggacaagatctatgtcttctagcagcatctgtggtccaggcttcacctcacgggcctagcgcctgcctctgcatcacctgccagttgccacaagaacaccacgggtgtgagtcccagctctgctgcccagcattggatgtcgtggcaagacagcgagattccagcccaggcctgactcaggacagttcctggtggcactgagccttggagttgcctctgcggaggaggaggcctgctccgcattccccagacactggccaaattgctgctttcttctcagtgttgggtcctccccaggaccctagtctgtccatctgtcttgtttatccactggctctccatttgtccctttggagaggaaggtgggaaggcaatgtcctgtcccatttcatgccttgcattctgcccatcccttccctcctctcagcttaggacacacagccctttcttcttcccatgctctgtccaggaccacagtctggtgcctgattctttgtccatcaccaggacctaagctctccctgggtctgtagctggctgctatcactgcccactctgacctgccaggacagatgcaggtaggagactttgggggctggccagctggtgccaggctttcggtgctaaggcctggaaggggcctaggtacgaccctcctccctgacctgtgcttggagctggctcttcagcagtgagggccagcccaagttgagtcttctgatcggggactgaattcagaggccacctcatcccaccagccactagaatgatgccagcactagggttggtgggaagtggcaactcactgtccccttccacaccctcagtcctgccaagccccagatgggggcctctcagtgccattgacactgcccaagaatgtctagaggccacggaacggtgccaagcacacagtcccttttgcctctttcacgggagcaggagtcccagtgcctgtcgtggaaagggaggaacatgccaggtccctgtgtgtccttggccctgtctcaccaaaggactcagggctggtttctgagtttccgtccagtatttagccaagttctgtgttagtcacgtaggcctaagagccttggcgtttacagagtcacccagctctggcccctggccattctggtccttggcgtttacagagtcacccagctccaggcccctggccactttggtacttggttgcccttcacttcaccaggtccattccagatgccaagagtgggccccaggaatgtgtttccttctctccaccatgtttttatagctcttgggctgggagaagaggcgggtctgggtctttgtttctgagctttgttctatgttcctccatgctacggttgcaattgttttctatgaacgagtacattcaataaagacaaccagacctgg

SEQ ID NO: 164 - protein, 853 aa, Mus musculus
MIAWRLPLCVLLVASVESHLGALGPKNVSQKDAEFERTYADDVNSELVNIYTFNHTVTRNRTEGVRVSVNVLNKQKGAPLLFVVRQKEAVVSFQVPLILRGLYQRKYLYQKVERTLCQPPTKNESEIQFFYVDVSTLSPVNTTYQLRVNRVDNFVLRTGELFTFNTTAAQPQYFKYEFPDGVDSVIVKVTSKKAFPCSVISIQDVLCPVYDLDNSVAFIGMYQTMTKKAAITVQRKDFPSNSFYVVVVVKTEDQACGGSLPFYPFVEDEPVDQGHRQKTLSVLVSQAVTSEAYVGGMLFCLGIFLSFYLLTVLLACWENWRQRKKTLLVAIDRACPESGHARVLADSFPGSAPYEGYNYGSFENGSGSTDGLVESAGSGDLSYSYQGHDQFKRRLPSGQMRQLCIAMDRSFDAVGPRPRLDSMSSVEEDDYDTLTDIDSDKNVIRTKQYLCVADLARKDKRVLRKKYQIYFWNIATIAVFYALPVVQLVITYQTVVNVTGNQDICYYNFLCAHPLGNLSAFNNILSNLGYILLGLLFLLIILQREINHNRALLRNDLYALECGIPKHFGLFYAMGTALMMEGLLSACYHVCPNYTNFQFDTSFMYMIAGLCMLKLYQKRHPDINASAYSAYACLAIVIFFSVLGVVFGKGNTAFWIVFSVIHIISTLLLSTQLYYMGRWKLDFGIFRRILHVLYTDCIRQCSGPLYTDRMVLLVMGNIINWSLAAYGLIMRPNDFASYLLAIGICNLLLYFAFYIIMKLRSGERIKLIPLLCIVCTSVVWGFALFFFFQGLSTWQKTPAESREHNRDCILLDFFDDHDIWHFLSSIAMFGSFLVLLTLDDDLDTVQRDKIYVF

SEQ ID NO: 165 - DNA, 3138 bp, Homo sapiens
  CDS (84)..(2648)
gccgcaacccgtcccggaggtgtcctgtctcctgtcgccgccgccgccgccaccaccgctgccactgccgccctgccggggccatgttcgctctgggcttgcccttcttggtgctcttggtggcctcggtcgagagccatctgggggttctggggcccaagaacgtctcgcagaaagacgccgagtttgagcgcacctacgtggacgaggtcaacagcgagctggtcaacatctacaccttcaaccatactgtgacccgcaacaggacagagggcgtgcgtgtgtctgtgaacgtcctgaacaagcagaagggggcgccgttgctgtttgtggtccgccagaaggaggctgtggtgtccttccaggtgcccctaatcctgcgagggatgtttcagcgcaagtacctctaccaaaaagtggaacgaaccctgtgtcagccccccaccaagaatgagtcggagattcagttcttctacgtggatgtgtccaccctgtcaccagtcaacaccacataccagctccgggtcagccgcatggacgattttgtgctcaggactggggagcagttcagcttcaataccacagcagcacagccccagtacttcaagtatgagttccctgaaggcgtggactcggtaattgtcaaggtgacctccaacaaggccttcccctgctcagtcatctccattcaggatgtgctgtgtcctgtctatgacctggacaacaacgtagccttcatcggcatgtaccagacgatgaccaagaaggcggccatcaccgtacagcgcaaagacttccccagcaacagcttttatgtggtggtggtggtgaagaccgaagaccaagcctgcgggggctccctgcctttctaccccttcgcagaagatgaaccggtcgatcaagggcaccgccagaaaaccctgtcagtgctggtgtctcaagcagtcacgtctgaggcatacgtcagtgggatgctcttttgcctgggtatatttctctccttttacctgctgaccgtcctcctggcctgctgggagaactggaggcagaagaagaagaccctgctggtggccattgaccgagcctgcccagaaagcggtcaccctcgagtcctggctgattcttttcctggcagttccccttatgagggttacaactatggctcctttgagaatgtttctggatctaccgatggtctggttgacagcgctggcactggggacctctcttacggttaccaggggcacgaccagttcaagcggcgcctcccctctggccagatgcggcagctgtgcattgccatgggccgctcctttgaacctgtaggtactcggccccgagtggactccatgagctctgtggaggaggatgactacgacacattgaccgacatcgattccgacaagaatgtcattcgcaccaagcaatacctctatgtggctgacctggcacggaaggacaagcgtgttctgcggaaaaagtaccagatctacttctggaacattgccaccattgctgtcttctatgcccttcctgtggtgcagctggtgatcacctaccagacggtggtgaatgtcacagggaatcaggacatctgctactacaacttcctctgcgcccacccactgggcaatctcagcgccttcaacaacatcctcagcaacctggggtacatcctgctggggctgcttttcctgctcatcatcctgcaacgggagatcaaccacaaccgggccctgctgcgcaatgacctctgtgccctggaatgtgggatccccaaacactttgggcttttctacgccatgggcacagccctgatgatggaggggctgctcagtgcttgctatcatgtgtgccccaactataccaatttccagtttgacacatcgttcatgtacatgatcgccggactctgcatgctgaagctctaccagaagcggcacccggacatcaacgccagcgcctacagtgcctacgcctgcctggccattgtcatcttcttctctgtgctgggcgtggtctttggcaaagggaacacggcgttctggatcgtcttctccatcattcacatcatcgccaccctgctcctcagcacgcagctctattacatgggccggtggaaactggactcggggatcttccgccgcatcctccacgtgctctacacagactgcatccggcagtgcagcgggccgctctacgtggaccgcatggtgctgctggtcatgggcaacgtcatcaactggtcgctggctgcctatgggcttatcatgcgccccaatgatttcgcttcctacttgttggccattggcatctgcaacctgctcctttacttcgccttctacatcatcatgaagctccggagtggggagaggatcaagctcatccccctgctctgcatcgtttgcacctccgtggtctggggcttcgcgctcttcttcttcttccagggactcagcacctggcagaaaacccctgcagagtcgagggagcacaaccgggactgcatcctcctcgacttctttgacgaccacgacatctggcacttcctctcctccatcgccatgttcgggtccttcctggtaagcgggcctcccggccgagccgggtgggtacgtgaaggtagcagctgcctccttccctgtggctgatctggcgtccacaccccaggtgttgctgacactggatgacgacctggatacttagaaaggggcttcaggaagggatgtgctgtttccctctacgtgcccagtcctagcctcgctctaggacccagggctggcttctaagtttccgtccagtcttcaggcaagttctgtgttagtcatgcacacacatacctatgaaaccttggagtttacaaagaattgccccagctctgggcaccctggccaccctggtccttggatccccttcgtcccacctggtccaccccagatgctgaggatgggggagctcaggcggggcctctgctttggggatgggaatgtgtttttctcccaaacttgtttttatagctctgcttgaagggctgggagatgaggtgggtctggatcttttctcagagcgtctccatgctatggttgcatttccgttttctatgaatgaatttgcattcaataaacaaccagactcagt

SEQ ID NO: 166 - protein, 855 aa, Homo sapiens
MFALGLPFLVLLVASVESHLGVLGPKNVSQKDAEFERTYVDEVNSELVNIYTFNHTVTRNRTEGVRVSVNVLNKQKGAPLLFVVRQKEAVVSFQVPLILRGMFQRKYLYQKVERTLCQPPTKNESEIQFFYVDVSTLSPVNTTYQLRVSRMDDFVLRTGEQFSFNTTAAQPQYFKYEFPEGVDSVIVKVTSNKAFPCSVISIQDVLCPVYDLDNNVAFIGMYQTMTKKAAITVQRKDFPSNSFYVVVVVKTEDQACGGSLPFYPFAEDEPVDQGHRQKTLSVLVSQAVTSEAYVSGMLFCLGIFLSFYLLTVLLACWENWRQKKKTLLVAIDRACPESGHPRVLADSFPGSSPYEGYNYGSFENVSGSTDGLVDSAGTGDLSYGYQGHDQFKRRLPSGQMRQLCIAMGRSFEPVGTRPRVDSMSSVEEDDYDTLTDIDSDKNVIRTKQYLYVADLARKDKRVLRKKYQIYFWNIATIAVFYALPVVQLVITYQTVVNVTGNQDICYYNFLCAHPLGNLSAFNNILSNLGYILLGLLFLLIILQREINHNRALLRNDLCALECGIPKHFGLFYAMGTALMMEGLLSACYHVCPNYTNFQFDTSFMYMIAGLCMLKLYQKRHPDINASAYSAYACLAIVIFFSVLGVVFGKGNTAFWIVFSIIHIIATLLLSTQLYYMGRWKLDSGIFRRILHVLYTDCIRQCSGPLYVDRMVLLVMGNVINWSLAAYGLIMRPNDFASYLLAIGICNLLLYFAFYIIMKLRSGERIKLIPLLCIVCTSVVWGFALFFFFQGLSTWQKTPAESREHNRDCILLDFFDDHDIWHFLSSIAMFGSFLVSGPPGRAGWVREGSSCLLPCG

SEQ ID NO: 167 - DNA, 2815 bp, Homo sapiens
  CDS (56)..(571)
gcgaagcgcgcctgcgacccggcgtccgggcgcgctggagaggacgcgaggagccatgaggcgccagcctgcgaaggtggcggcgctgctgctcgggctgctcttggagtgcacagaagccaaaaagcattgctggtatttcgaaggactctatccaacctattatatatgccgctcctacgaggactgctgtggctccaggtgctgtgtgcgggccctctccatacagaggctgtggtacttctggttccttctgatgatgggcgtgcttttctgctgcggagccggcttcttcatccggaggcgcatgtaccccccgccgctgatcgaggagccagccttcaatgtgtcctacaccaggcagcccccaaatcccggcccaggagcccagcagccggggccgccctattacaccgacccaggaggaccggggatgaaccctgtcgggaattccatggcaatggctttccaggtcccacccaactcaccccaggggagtgtggcctgcccgccccctccagcctactgcaacacgcctccgcccccgtacgaacaggtagtgaaggccaagtagtggggtgcccacgtgcaagaggagggacaggagagggcctttccctggcctttctgtcttcgttgatgttcacttccaggaacggtctcgtgggctgctaagggcagttcctctgatatcctcacagcaagcacagctctctttcaggctttccatggagtacaatatatgaactcacactttgtctcctctgttgcttctgtttctgacgcagtctgtgctctcacatggtagtgtggtgacagtccccgagggctgacgtccttacggtggcgtgaccagatctacgggagagagactgagaggaagaaggcagtgctggaggtgcaggtggcatgtagaggggccaggccgagcatcccaggcaagcatccttctgcccgggtattaataggaagccccatgccgggcggctcagccgatgaagcagcagccgactgagctgagcccagcaggtcatctgctccagcctgtcctctcgtcagccttcctcttccagaagctgttggagagacattcaggagagagcaagccccttgtcatgtttctgtctctgttcatatcctaaagatagacttctcctgcaccgccagggaagggtagcacgtgcagctctcaccgcaggatggggcctagaatcaggcttgccttggaggcctgacagtgatctgacatccactaagcaaatttatttaaattcatgggaaatcacttcctgccccaaactgagacattgcattttgtgagctcttggtctgatttggagaaaggactgttacccatttttttggtgtgtttatggaagtgcatgtagagcgtcctgccctttgaaatcagactgggtgtgtgtcttccctggacatcactgcctctccagggcattctcaggcccgggggtctccttccctcaggcagctccagtggtgggttctgaagggtgctttcaaaacggggcacatctggctgggaagtcacatggactcttccagggagagagaccagctgaggcgtctctctctgaggttgtgttgggtctaagcgggtgtgtgctgggctccaaggaggaggagcttgctggggaaagacaggagaagtactgactcaactgcactgaccatgttgtcataattagaataaagaagaagtggtcggaaatgcacattcctggataggaatcacagctcaccccaggatctcacaggtagtctcctgagtagttgacggctagcggggagctagttccgccgcatagttatagtgttgatgtgtgaacgctgacctgtcctgtgtgctaagagctatgcagcttagctgaggcgcctagattactagatgtgctgtatcacggggaatgaggtgggggtgcttattttttaatgaactaatcagagcctcttgagaaattgttactcattgaactggagcatcaagacatctcatggaagtggatacggagtgatttggtgtccatgcttttcactctgaggacatttaatcggagaacctcctggggaattttgtgggagacacttgggaacaaaacagacaccctgggaatgcagttgcaagcacagatgctgccaccagtgtctctgaccaccctggtgtgactgctgactgccagcgtggtacctcccatgctgcaggcctccatctaaatgagacaacaaagcacaatgttcactgtttacaaccaagacaactgcgtgggtccaaacactcctcttcctccaggtcatttgttttgcatttttaatgtctttattttttgtaatgaaaaagcacactaagctgcccctggaatcgggtgcagctgaataggcacccaaaagtccgtgactaaatttcgtttgtctttttgatagcaaattatgttaagagacagtgatggctagggctcaacaattttgtattcccatgtttgtgtgagacagagtttgttttcccttgaacttggttagaattgtgctactgtgaacgctgatcctgcatatggaagttccgcttcggtgacatttcctggccattcttgtttccattgtgtggatggtgggttgtgcccacttcctggagtgagacagctcctggtgtgtagaattcccggagcgtccgtggttcagagtaaacttgaagcagatctgtgcatgcttttcctctgcaacaattggctcgtttctcttttttgttctcttttgataggatcctgtttcctatgtgtgcaaaataaaaataaatttgggc

SEQ ID NO: 168 - protein, 172 aa, Homo sapiens
MRRQPAKVAALLLGLLLECTEAKKHCWYFEGLYPTYYICRSYEDCCGSRCCVRALSIQRLWYFWFLLMMGVLFCCGAGFFIRRRMYPPPLIEEPAFNVSYTRQPPNPGPGAQQPGPPYYTDPGGPGMNPVGNSMAMAFQVPPNSPQGSVACPPPPAYCNTPPPPYEQVVKAK

SEQ ID NO: 169 - DNA, 3337 bp, Homo sapiens
  CDS (136)..(1755)
tctcgctgcgggaagggtcctgggccccgggcggcggtcgccaggtctcagggccgggggtacccgagtctcgtttcctctcagtccatccacccttcatggggccagagccctctctccagaatctgagcagcaatgccgtttgctgaagacaagacctataagtatatctgccgcaatttcagcaatttttgcaatgtggatgttgtagagattctgccttacctgccctgcctcacagcaagagaccaggatcgactgcgggccacctgcacactctcagggaaccgggacaccctctggcatctcttcaatacccttcagcggcggcccggctgggtggagtacttcattgcggcactgaggggctgtgagctagttgatctcgcggacgaagtggcctctgtctaccagagctaccagcctcggacctcggaccgtcccccagacccactggagccaccgtcacttcctgctgagaggccagggccccccacacctgctgcggcccacagcatcccctacaacagctgcagagagaaggagccaagttaccccatgcctgtccaggagacccaggcgccagagtccccaggagagaattcagagcaagccctgcagacgctcagccccagagccatcccaaggaatccagatggtggccccctggagtcctcctctgacctggcagccctcagccctctgacctccagcgggcatcaggagcaggacacagaactgggcagtacccacacagcaggtgcgacctccagcctcacaccatcccgtgggcctgtgtctccatctgtctccttccagcccctggcccgttccacccccagggcaagccgcttgcctggacccacagggtcagttgtatctactggcacctccttctcctcctcatcccctggcttggcctctgcaggggctgcagagggtaaacagggtgcagagagtgaccaggccgagcctatcatctgctccagtggggcagaggcacctgccaactctctgccctccaaagtgcctaccaccttgatgcctgtgaacacagtggccctgaaagtgcctgccaacccagcatctgtcagcacagtgccctccaagttgccaactagctcaaagccccctggtgcagtgccttctaatgcgctcaccaatccagcaccatccaaattgcccatcaactcaacccgtgctggcatggtgccatccaaagtgcctactagcatggtgctcaccaaggtgtctgccagcacagtccccactgacgggagcagcagaaatgaggagaccccagcagctccaacacccgccggcgccactggaggcagctcagcctggctagacagcagctctgagaataggggccttgggtcggagctgagtaagcctggcgtgctggcatcccaggtagacagcccgttctcgggctgcttcgaggatcttgccatcagtgccagcacctccttgggcatggggccctgccatggcccagaggagaatgagtataagtccgagggcacctttgggatccacgtggctgagaaccccagcatccagctcctggagggcaaccctgggccacctgcggacccggatggcggccccaggccacaagccgaccggaagttccaggagagggaggtgccatgccacaggccctcacctggggctctgtggctccaggtggctgtgacaggggtgctggtagtcacactcctggtggtgctgtaccggcggcgtctgcactagtgaagccctgggctcttcccaccacccatctgttccgttcctgcagtatacctggcccctctccgaagcccctctttccctcccctctggtctccattctcttcagctccctacatgggctggggaggagacacctggtgggcagagctcaggcagaggtttggatttcagctccctcacttccggggctgtgtggctttggcagatgtcagacttctggtcttgcttctccacgtggacagtgagtatctggctcattcttcactgggttcttctgagattgaacctacaggtgtttgccaagtgcctggcccagagcaagtggccactgcttctcccatctctctcctgcccaacctggtagagctgagggcatgagaggcagagtgcacagtggtcaagggtgcagctctgcggcacaggcagcctaggcctgcgtcccaacctgcctctcaccagctctgtgaccttgggcaagggatttatctgtctgtcccttagttttctcacctgtaaaaggaggataagtatatatatatatttcccagtgttgtgaagattaaaggagtttatcgatgtaggtcttaggatgagtcctggcatttaccaagggttggatatatgttattatcactattaagtgttgagggtccaggcatgctgggcaacagggaccccatctctacaaaaaagtttaaaaaattagccaggcgtggtggtgcacctgtcgtcttagctacttgggaggctgaggtgggaggatcgcttgagcccggaagcttgaagctgcagtgagctaggatcgtgccactgcactccaacctgggtgagagagcgagaccctgtctcaagaaaaagaaaaatgcagagaaacaggagtcttggctactcctttagaggcagactcagaccctcctgcctcacagctttatctttgtatttgccccttactttatcttgtgccttgagaaattgctggggagagaggtatgtccactgggcagctgtacaggatggaggatatagggcgtttccactcccagcagccaggttccctcaccccaagctcacccactgttggggagattatctacaataacaccagaaacacattggggtggattgggggtatccttatgggttcttttcagggaaccattgctggacaaggcacaggagccacctccatttctgagctctgcaagggacaagaactagagccatcaggggctgggctcactgtggccccaccccaagccgtcagcctccagggatctacaccctgccttggctgctacagctttttcactccactgccctaggggagttcagcaacctaatgatctctatctctgaacatctcttcatcccatgctccaagtccagcaacctgcaccctggaaccaggagtggaccctacccgggctgtctgtattaatccccatcccccaccaccaatcttaaaaagccctctgtccccctaccctaaaccccagttaggtacccatgctgggcaggtcagttaacaatttatgcacaggtactagttttattgtattaccgttccagggtagctttg

SEQ ID NO: 170 - protein, 540 aa, Homo sapiens
MPFAEDKTYKYICRNFSNFCNVDVVEILPYLPCLTARDQDRLRATCTLSGNRDTLWHLFNTLQRRPGWVEYFIAALRGCELVDLADEVASVYQSYQPRTSDRPPDPLEPPSLPAERPGPPTPAAAHSIPYNSCREKEPSYPMPVQETQAPESPGENSEQALQTLSPRAIPRNPDGGPLESSSDLAALSPLTSSGHQEQDTELGSTHTAGATSSLTPSRGPVSPSVSFQPLARSTPRASRLPGPTGSVVSTGTSFSSSSPGLASAGAAEGKQGAESDQAEPIICSSGAEAPANSLPSKVPTTLMPVNTVALKVPANPASVSTVPSKLPTSSKPPGAVPSNALTNPAPSKLPINSTRAGMVPSKVPTSMVLTKVSASTVPTDGSSRNEETPAAPTPAGATGGSSAWLDSSSENRGLGSELSKPGVLASQVDSPFSGCFEDLAISASTSLGMGPCHGPEENEYKSEGTFGIHVAENPSIQLLEGNPGPPADPDGGPRPQADRKFQEREVPCHRPSPGALWLQVAVTGVLVVTLLVVLYRRRLH

SEQ ID NO: 171 - DNA, 3579 bp, Homo sapiens
  CDS (242)..(3094)
gtagtttcggctcggcagacccggcgagcccagtggccgcgctccggtgcggcggcgcccgaggcccgaggcggaagtgggacggccaagcagggaagcgagggctcgggatcgacggccgcggggcgccgacgaggagtgcaggactcaggaagggcgagtgcgcggcgacagagcccggggaaggaggcagggcaaggccgggcttgggggcaggtggtccgggcatccagccttgaagatgcacaagaggaaaggacccccgggacccccgggcagaggcgccgcggccgcccgccagctgggcctgctggttgacctctccccagatggcctgatgatccctgaggacggggctaacgatgaagaactggaggctgagttcttggctttggtcgggggccagcccccagccctggagaagctcaaaggcaaaggtcccttgccgatggaggccattgagaagatggccagcctgtgcatgagagacccggatgaggatgaggaggaggggacggatgaggacgacttggaggctgatgatgacctgctggcggagctaaatgaggtccttggagaggagcagaaggcttcagagaccccacctcctgtggcccagccgaagcctgaggcccctcatccggggctggagaccaccttgcaggagaggctggcgctctatcagacagcaattgaaagcgccagacaagctggagacagcgccaagatgcggcgctacgatcgggggcttaaaacactggaaaacctgctcgcctccatccgtaagggcaatgccattgacgaagcggacatcccgccgccagtggccataggaaaaggcccggcgtccacgcctacctacagccctgcacccacccagccggcccctagaatcgcgtcagccccagagcccagggtcaccctggagggaccttctgccaccgccccagcctcatctccaggcttggctaagccccagatgcccccaggtccctgcagccctggccctctggcccagttgcagagccgccagcgcgactacaagctggctgccctccacgccaagcagcagggagataccactgctgccgctagacacttccgcgtggctaagagctttgatgctgtcttggaggccctgagccggggtgagcccgtggacctctcctgcctgccccctccacccgaccagctgcccccagacccaccgtcaccaccgtcgcagcctccgacccccgctacggcgccctccacaacagaggtgcccccacccccgaggaccctgctggaggcgctggagcagcggatggagcggtaccaggtggccgcagcccaggccaagagcaagggggaccagcggaaagctcgaatgcacgagcgcatcgtcaagcaataccaagatgccatccgagcccacaaggctggccgagccgtggatgtcgctgaattgcccgtgcccccaggcttccccccaatccagggcctggaggccaccaagcccacccagcagagtctggtgggtgtcctggagactgccatgaagctggccaaccaggatgaaggcccagaggatgaagaggatgaggtgcctaagaagcagaacagccctgtggcccccacagcccagcccaaagccccaccctcaagaactccccagtcgggatcagccccaacagccaaagcgccccccaaagccacatccaccagagcccagcagcagctggccttcctagagggccgcaagaagcagctcctgcaggccgcactgcgagccaagcagaaaaacgacgtggagggtgccaagatgcacctgcgccaagccaagggactggagcctatgctggaggcctcgcgcaatgggctgcctgtggacatcaccaaggtgccgcctgcccctgtcaacaaggacgactttgccctggtccagcggcctggcccgggtctgtctcaggaggccgcccggcgctatggtgaactcaccaagctcatacggcagcagcacgagatgtgcctgaaccactcaaaccaattcacccagctgggcaacatcactgaaaccaccaagtttgaaaagttggcggaggactgtaagcggagcatggacattctgaagcaagccttcgtccggggtctccccacgcccaccgcccgctttgagcaaaggaccttcagcgtcatcaagatcttccctgacctcagcagcaacgacatgctcctcttcatcgtgaagggcatcaacttgcccacacccccaggactgtcccctggcgatctggatgtctttgttcggtttgacttcccctatcccaacgtggaagaagctcagaaagacaagaccagtgtgatcaagaacacagactcccctgagttcaaggagcagttcaaactctgcatcaaccgcagccaccgtggcttccgaagggccatccagaccaagggcatcaagttcgaagtggttcacaagggggggctgttcaagactgaccgggtgctggggacagcccagctgaagctggatgcactggagatagcatgtgaggtccgggagatccttgaggtcctggatggtcgccggcccacaggggggcgactggaggtaatggtccggattcgggagccactgacagcccagcagttggagacgacgacagagaggtggctggtcattgaccctgtgccggcagctgtgcccacacaggttgctgggcccaaagggaaggcccctcctgtgcctgcccctgcaagggagtcagggaacagatcagcccggcccctgcatagcctcagtgtgctggcgtttgaccaagagcgtctggagcggaagatcctggccctcaggcaggcgcggcggccggtgcccccagaagtggcccagcagtaccaggacatcatgcaacgcagccagtggcagagggcacagctggagcaggggggtgtgggcatccgacgggaatacacagcccagctggagcggcagctgcagttctacacggaggctgcccggcgcctgggcaacgatggcagcagggatgctgcaaaggaggcgctctataggcggaatctggtagggagtgagctgcagcggctccgcaggtgaggagcccatggggcgggcagcccccagaaagcgggcagcaggccccgataccgggaagagccgacacagccacgaaccagacaagcagacaatcagcggacaatcggttctggactcacccctcatccgggcccccagccccgccagagcctccgtggctgcgggtgttgggaaccatgcctgccagccagtatgtgcccctcacccaggcctggctgggccctggagagtcctgtttgcacagcccaggggtgtccggcctctggcccgccccggagcagggagggcggctggggccaagccccgagggcccctgcaagcactttacttcctgttcctccccagccttaaccccaaagccctcctgcaccccaaagaagccactgaggctggccgagccacactgtctccccaggggcgtcgacctggcccagctgggtccccaggccagcacatggaataaaatagccagggccacactc

SEQ ID NO: 172 - protein, 951 aa, Homo sapiens
MHKRKGPPGPPGRGAAAARQLGLLVDLSPDGLMIPEDGANDEELEAEFLALVGGQPPALEKLKGKGPLPMEAIEKMASLCMRDPDEDEEEGTDEDDLEADDDLLAELNEVLGEEQKASETPPPVAQPKPEAPHPGLETTLQERLALYQTAIESARQAGDSAKMRRYDRGLKTLENLLASIRKGNAIDEADIPPPVAIGKGPASTPTYSPAPTQPAPRIASAPEPRVTLEGPSATAPASSPGLAKPQMPPGPCSPGPLAQLQSRQRDYKLAALHAKQQGDTTAAARHFRVAKSFDAVLEALSRGEPVDLSCLPPPPDQLPPDPPSPPSQPPTPATAPSTTEVPPPPRTLLEALEQRMERYQVAAAQAKSKGDQRKARMHERIVKQYQDAIRAHKAGRAVDVAELPVPPGFPPIQGLEATKPTQQSLVGVLETAMKLANQDEGPEDEEDEVPKKQNSPVAPTAQPKAPPSRTPQSGSAPTAKAPPKATSTRAQQQLAFLEGRKKQLLQAALRAKQKNDVEGAKMHLRQAKGLEPMLEASRNGLPVDITKVPPAPVNKDDFALVQRPGPGLSQEAARRYGELTKLIRQQHEMCLNHSNQFTQLGNITETTKFEKLAEDCKRSMDILKQAFVRGLPTPTARFEQRTFSVIKIFPDLSSNDMLLFIVKGINLPTPPGLSPGDLDVFVRFDFPYPNVEEAQKDKTSVIKNTDSPEFKEQFKLCINRSHRGFRRAIQTKGIKFEVVHKGGLFKTDRVLGTAQLKLDALEIACEVREILEVLDGRRPTGGRLEVMVRIREPLTAQQLETTTERWLVIDPVPAAVPTQVAGPKGKAPPVPAPARESGNRSARPLHSLSVLAFDQERLERKILALRQARRPVPPEVAQQYQDIMQRSQWQRAQLEQGGVGIRREYTAQLERQLQFYTEAARRLGNDGSRDAAKEALYRRNLVGSELQRLRR

SEQ ID NO: 173 - DNA, 2796 bp, Mus musculus
  CDS (574)..(1683)
aagcatttcctattgagacccccaagagttcccccggcggccctcggctccagcaagactttgggccttttcttgtgtcctgtttgttaaaggcatgcgggctccagcattaaagagggctagtccttaacaaagggaaagcgataaatgtaaataagctcacattttcagaatgagcggtttgcagtaaggagctgcggcagcccagagtctgctctttttgggctgggctaacctttccctgttttttgttttttgttttgttttgtttttgttttttatggataaaaatatgcgcttccgaagtgcgagttgccagtttacacgtttattagctaactatctacaggcatgagcacattctctcatctagcacactctttcttgggcactcaattgaggaactctctgatcgtctgcctccagaaaattcattgattatccaagtctcagataaatctggtgccagagtttggtttgaactaactaatgaagaaagcattctctactggtcctcagtctcaagagtggtgaacccctgcacctagcaggctctctgggaaaaaaaaatccatgggtgacagaagatttattgacttccaattccaagatttaaattcaagtctcagacccaggttgggaaatgcaactgccaataatacttgcattgttgatgattccttcaagtataatttgaatggtgctgtctatagtgttgtattcatcctgggtctaataaccaacagtgcctccctgtttgtcttctgcttccgcatgaaaatgagaagtgagacggctactttcatcaccaacctggccctctctgatttgctttttgtttgtaccctacctttcaaaatattttacaactttaatcgccactggccttttggtgacaccctctgtaagatctcagggactgcgttcctcaccaacatctatgggagcatgctcttcctcacctgcatcagtgtggatcgtttcctagccattgtctatcccttccgatcgcgtaccatcaggaccaggaggaattccgccattgtgtgcgctggagtctggatcctagtcctcagtggtggtatttcagcttctttgttctccaccactaatgtcaacaatgcgaccaccacttgctttgaaggcttctccaaacgtgtctggaagacatacctgtccaagatcactatattcattgaagttgttggattcatcattcctctgatattgaatgtttcttgttcttctgtggtgcttagaaccctccgcaagcctgcaacattgtctcagattgggaccaataagaaaaaagtgttgaagatgatcacagtgcatatggcagtgtttgtggtatgctttgtaccatacaactccgttctctttttatatgccttggtacgctcccaagccattactaattgcttattggaaaggtttgcaaagatcatgtacccaattaccttgtgccttgcaactctgaattgttgctttgatccttttatctattacttcactcttgaatcctttcagaagtccttttatatcaatacacatataaggatggagtcgctgtttaagactgagacacctctgacccccaaaccttcccttccagctatccaagaggaagttagtgatcaaacaacaaataatggtggtgaattaatgctggaatccaccttctaggtaccagaattgtctttcaggttcagctacagtgtctcttatgatttttttcctatgctataaataggagaaacaaattgaagctaatgatactgagaatagagtaatgtaccaaatgcagtcagatacatttgtttgaacactattgtacatattctgttttgttcagtaattataggtcaagtctaattacaacaaccaaaacagatcagcctcttctgttgagttgacttttcattacctaaatgaccagtggtcttgacttttagtgatgtgagggttatttttaaacttaaaaaaaaaggcattccagtaattttggtaattgggttgggcctataaatatagaacaaattcagggattatttaaaaacatctgtgttactactgatatatgctagtatttttttccttttttgaattaatattgaatttattttaaaaaaagaactatttttacctaatcttaataagacatactgagaaagagaaatgtgttgaattttaaaatattggcaaattttacctagattttaaaaacctaaatgaagtgtttgaatgaatatgggtgggaaatttggaatttagacaacatttacgcatttataataaccacaattagtgtcagcttttaaaactttctttttaaaataattctagaattttcatatgaaattgttaatcctgaaaggtgctacttatgtgcctggcaggtataaaatggaaaactcataaaattaacagtgtcaatttaaaaaaaaaaaaactttaagcaacactatattatttcttaagattttcatttatcctttatgggggtggggattggcttgtagaaaatatttattcttcatgttaaatgttggggacacattacagccagagagctacagtatttgtgcccaggtcaggagtaaattgaaaaagtaagtgaatagaatagtagcagcaagatatcttagagcttatattagtagtttttaaggtggtggttagatagctgtaattttgaaatccatactctcttctgtacattttggagcacattgtagccaaggcgctgctgaatttgtgctcaggtcgggagcatattgaaaaagatgtgtacat

SEQ ID NO: 174 - protein, 370 aa, Mus musculus
MGDRRFIDFQFQDLNSSLRPRLGNATANNTCIVDDSFKYNLNGAVYSVVFILGLITNSASLFVFCFRMKMRSETATFITNLALSDLLFVCTLPFKIFYNFNRHWPFGDTLCKISGTAFLTNIYGSMLFLTCISVDRFLAIVYPFRSRTIRTRRNSAIVCAGVWILVLSGGISASLFSTTNVNNATTTCFEGFSKRVWKTYLSKITIFIEVVGFIIPLILNVSCSSVVLRTLRKPATLSQIGTNKKKVLKMITVHMAVFVVCFVPYNSVLFLYALVRSQAITNCLLERFAKIMYPITLCLATLNCCFDPFIYYFTLESFQKSFYINTHIRMESLFKTETPLTPKPSLPAIQEEVSDQTTNNGGELMLESTF

SEQ ID NO: 175 - DNA, 2299 bp, Homo sapiens
  CDS (67)..(1176)
cctaccggtccatagtgtcagagtggtgaacccctgcagccagcaggcctcctgaaaaaaaagtccatgggtgacagaagattcattgacttccaattccaagattcaaattcaagcctcagacccaggttgggcaatgctactgccaataatacttgcattgttgatgattccttcaagtataatctcaatggtgctgtctacagtgttgtattcatcttgggtctgataaccaacagtgtctctctgtttgtcttctgtttccgcatgaaaatgagaagtgagactgctatttttatcaccaatctagctgtctctgatttgctttttgtctgtacactaccttttaaaatattttacaacttcaaccgccactggccttttggtgacaccctctgcaagatctctggaactgcattccttaccaacatctatgggagcatgctctttctcacctgtattagtgtggatcgtttcctggccattgtctatccttttcgatctcgtactattaggactaggaggaattctgccattgtgtgtgctggtgtctggatcctagtcctcagtggcggtatttcagcctctttgttttccaccactaatgtcaacaatgcaaccaccacctgctttgaaggcttctccaaacgtgtctggaagacttatttatccaagatcacaatatttattgaagttgttgggtttatcattcctctaatattgaatgtctcttgctcttctgtggtgctgagaactcttcgcaagcctgctactctgtctcaaattgggaccaataagaaaaaagtactgaaaatgatcacagtacatatggcagtctttgtggtatgctttgtaccctacaactctgtcctcttcttgtatgccctggtgcgctcccaagctattactaattgctttttggaaagatttgcaaagatcatgtacccaatcaccttgtgccttgcaactctgaactgttgttttgaccctttcatctattacttcacccttgaatcctttcagaagtccttctacatcaatgcccacatcagaatggagtccctgtttaagactgaaacacctttgaccacaaagccttcccttccagctattcaagaggaagtgagtgatcaaacaacaaataatggtggtgaattaatgctagaatccaccttttaggtatgagaaatgtgttcaggtccagatatggtttctcctataatttttcctatgctataaactaaagatttgaagctaatgatactgagaataatgcaccaaatccagtcagatacatttgtttgaaggtatactgtagagtttttattgctgttttgttcagtaattataggtcaaatctaattacaacaaccaagatggattgccaaactcttctgcttggttggaatttcattgtatcgcattatccaggtggctagtggcatttgataatatagagatgactttgaaactttcaaaaaggtatttctattccaatgatatttggtaattaggttgggcctataaatatagaacaaattcagggatttttaaaaaattgtgttactactgatatatgctagttttattttatttttttggactgtcattgagtttattttagcacaagaatatttttagcctaacattattaataagaaatgtgtcaaatttttaacattggtaaaatatgttatgtgcattttgaaaacagaaaacaaattgcgttggcatgtacgtgggtgggaagaaaaagaaaattaacaggatttacacaattataatcaccagcagtgtgagtttaaaaaacttcgttgtttttacaccaaattaaaattttcatgtcaaacttcaaagccagaaagctgctaaatacgtgtctggcaggtaaaagctggaaaattacttaaaacaggaaagtgtcaataaaaaaacttgagcaacaccaacatattttttcttaaaatgtcacgttatcttcattttgggaaactaggttctataaaatatttatcctccctgttatactttggagcacagcacagccagaaaggggctgcatttgtgcccaggtcaggagcaaattgaaaaaaaaaataaagtaatactaaaaaatcaaactataaacccaaaacatttattaaaacctgaattaatcctttttggagggaggagtagagatatataacctgaaaatacttattctttcttatcgaattttggagcctaatatagccaggagctgctgaatttgtgcccctggattggaaccaaataaaaaaaaaaaaaaaaaattcct

SEQ ID NO: 176 - protein, 370 aa, Homo sapiens
MGDRRFIDFQFQDSNSSLRPRLGNATANNTCIVDDSFKYNLNGAVYSVVFILGLITNSVSLFVFCFRMKMRSETAIFITNLAVSDLLFVCTLPFKIFYNFNRHWPFGDTLCKISGTAFLTNIYGSMLFLTCISVDRFLAIVYPFRSRTIRTRRNSAIVCAGVWILVLSGGISASLFSTTNVNNATTTCFEGFSKRVWKTYLSKITIFIEVVGFIIPLILNVSCSSVVLRTLRKPATLSQIGTNKKKVLKMITVHMAVFVVCFVPYNSVLFLYALVRSQAITNCFLERFAKIMYPITLCLATLNCCFDPFIYYFTLESFQKSFYINAHIRMESLFKTETPLTTKPSLPAIQEEVSDQTTNNGGELMLESTF

SEQ ID NO: 177 - DNA, 973 bp, Homo sapiens
  CDS (30)..(416)
cagacagcggcgggcgcaggacgtgcactatggctcggggctcgctgcgccggttgctgcggctcctcgtgctggggctctggctggcgttgctgcgctccgtggccggggagcaagcgccaggcaccgccccctgctcccgcggcagctcctggagcgcggacctggacaagtgcatggactgcgcgtcttgcagggcgcgaccgcacagcgacttctgcctgggctgcgctgcagcacctcctgcccccttccggctgctttggcccatccttgggggcgctctgagcctgaccttcgtgctggggctgctttctggctttttggtctggagacgatgccgcaggagagagaagttcaccacccccatagaggagaccggcggagagggctgcccagctgtggcgctgatccagtgacaatgtgccccctgccagccggggctcgcccactcatcattcattcatccattctagagccagtctctgcctcccagacgcggcgggagccaagctcctccaaccacaaggggggtggggggcggtgaatcacctccgaggcctgggtccagggttcaggggaaccttccaaggtgtctggttgccctgcctctggctccagaacagaaagggagcctcacgctggctcacacaaaacagctgacactgactaaggaactgcagcatttgcacaggggaggggggtgccctccttcctagaggccctgggggccaggctgacttggggggcagacttgacactaggccccactcactcagatgtcctgaaattccaccacgggggtcaccctggggggttagggacctatttttaacactagggggctggcccactaggagggctggccctaagatacagacccccccaactccccaaagcggggaggagatatttattttggggagagtttggaggggagggagaatttattaataaaagaatctttaacttt

SEQ ID NO: 178 - protein, 129 aa, Homo sapiens
MARGSLRRLLRLLVLGLWLALLRSVAGEQAPGTAPCSRGSSWSADLDKCMDCASCRARPHSDFCLGCAAAPPAPFRLLWPILGGALSLTFVLGLLSGFLVWRRCRRREKFTTPIEETGGEGCPAVALIQ

SEQ ID NO: 179 - DNA, 3631 bp, Homo sapiens
  CDS (191)..(3244)
tctaaatcagcggccgctgaattctagggcgctgctggcgctgcagctgcacttgctccgggcgctggcgcaagatgatgttgctccatattttaaaacggagccaggcctaccacagatccacctggaagggaaccgccttgttctcacctgccttgccgaagggagctggcctttggagttcaagtggatgcgcgatgacagtgagctcaccacctacagcagcgaatataagtacattattccatctttgcagaagctcgatgctgggttttaccgctgcgtggtgcgaaacagaatgggagcactcctgcaaagaaaatcagaagttcaagtcgcatatatgggaagtttcatggatacggaccagaggaaaacagtttctcaaggacgtgcagcgattctaaacctgctgcccatcaccagctaccccagacctcaagtgacttggtttagagaagggcacaagattattccaagcaacagaatagccatcacattggagaatcagctggtgatcctcgccaccacaaccagtgatgccggggcatactacgtgcaggccgtgaatgagaaaaatggagaaaacaagacaagcccattcattcatttgagcatagcaagagatgttggcacacctgaaaccatggccccaaccattgtggttcccccgggcaacagaagtgtggtggctggatccagtgagaccaccttggaatgtatagccagtgccaggcctgtggaggacctgagtgtgacctggaagaggaatggagtgagaatcaccagtggcctccacagctttggaagacgcctcaccatcagcaacccgacgtccgcggacaccgggccatacgtctgcgaggcggcgctgccggggagcgcttttgaaccggccagggcgacggcctttcttttcatcatagagccaccatattttactgctgagcccgagagtcggatttcagctgaagtagaagaaactgtggacatcggatgtcaagccatgggggtcccccttcccaccctccagtggtacaaggatgccatctccatcagcaggctccagaatcctcgatacaaagtgctcgccagcggaggcctgcgcatccagaagctgcgtccagaggactccggaatcttccagtgcttcgccagcaatgaaggaggggagatccagacccacacctacctggatgtaaccaatatcgctccagtgttcacccagcggccagtggacaccacagttactgacgggatgacagccattctaaggtgtgaggtgtccggggctcccaaacccgccatcacctggaaaagagaaaaccacattctggccagtggctctgtccggattcctaggttcatgcttcttgaatcggggggtctacagatcgcgcccgtcttcatccaggatgccggcaactacacctgctatgcggccaacacagagggctccctgaatgcatcggccacgctcactgtgtggaatcggacgtccatcgtccaccctcctgaggaccacgtggtgattaaggggaccacggccacgctgcactgtggtgccacacatgacccccgggtttcactccgctacgtttggaagaaggacaacgtggccctgactccatcgagcacgtctaggatcgtggtggagaaggacgggtcccttctcatcagccagacgtggtcaggcgacatcggtgactacagctgcgagattgtttctgaaggagggaatgactccaggatggcccggctggaagtgattgaactgcctcattcacctcagaacctcctggtcagccctaattcttcccacagccacgccgtggtgctctcttgggtccggccctttgatggaaacagtcctattctttattacatcgtggagctgtctgaaaacaactctccatggaaggtgcatctgtcaaacgttggccctgagatgacaggcgtcaccgtgagtggcctgactccggctcgtacctatcaattccgggtgtgcgcggtgaatgaagtgggcaggggccagtacagtgccgagacaagcaggttgatgctacctgaagaaccacccagtgctcccccgaaaaatatagtggccagtgggcggactaatcagtccattatggtccagtggcagccacccccagaaacagagcacaacggggtgttgcgtggatacatcctcaggtaccgcctggctggccttcccggagagtaccagcagcggaacatcaccagcccggaggtgaactactgcctggtgacagacctgatcatctggacacagtatgagatacaggtggcggcgtacaacggggccggtctgggcgtcttcagcagggcagtgaccgagtacaccttgcagggagtgcccaccgcgcccccgcagaacgtgcagacggaagccgtgaactccaccaccattcagttcctgtggaaccctccgcctcagcagtttatcaatggcatcaaccagggatacaagcttctggcatggccggcagatgcccccgaggctgtcactgtggtcactattgccccagatttccacggagtccaccatggacacataacgaacctgaagaagtttaccgcctacttcacttccgttctgtgcttcaccacccctggggacgggcctcccagcacacctcagctggtctggactcaggaagacaaaccaggagctgtgggacatctgagtttcacagagatcttggacacatctctcaaggtcagctggcaggagcccctggagaaaaatggcatcattactggctatcagatctcttgggaagtgtacggcaggaacgactctcgtctcacgcacaccctgaacagcacgacgcacgagtacaagatccaaggcctctcatctctcaccacctacaccatcgacgtggccgctgtgactgccgtgggcactggcctggtgacttcatccaccatttcttctggagtgcccccagaccttcctggtgccccatccaacctggtcatttccaacatcagccctcgctccgccacccttcagttccggccaggctatgacgggaaaacgtccatctccaggtggattgttgaggggcagatgagacatcaaggtgttggattacctgccgaggtcacacagccaagccatgaagccggattggagcctgcaaacctcggaagtctgtggctgctcagcctggtgtattggtgttacagccagaaactttgggaattctcttgttagttggttagttttactgtaattttctataaagaattcatatcatctgttaatggcgacagtttttgtttcttcctttgaattttttatattctttctttctcttttttgtttcttcttctttgagtattttgtaatcttactgggagggctaaagcgtcttctatcatatcgaattgggacaatgatagaagacaatctttgttttgtcactctaaagaaattattgtaagattttatcatcaggtatgacatttacaccattgatgtaggctttttaaaaaatatatccagcctgtattgggttaagatgattcttttctgatcctgatttcctaggagttggtttttttttttttaaagcataaataaatttaattgcatcag

SEQ ID NO: 180 - protein, 1018 aa, Homo sapiens
MRDDSELTTYSSEYKYIIPSLQKLDAGFYRCVVRNRMGALLQRKSEVQVAYMGSFMDTDQRKTVSQGRAAILNLLPITSYPRPQVTWFREGHKIIPSNRIAITLENQLVILATTTSDAGAYYVQAVNEKNGENKTSPFIHLSIARDVGTPETMAPTIVVPPGNRSVVAGSSETTLECIASARPVEDLSVTWKRNGVRITSGLHSFGRRLTISNPTSADTGPYVCEAALPGSAFEPARATAFLFIIEPPYFTAEPESRISAEVEETVDIGCQAMGVPLPTLQWYKDAISISRLQNPRYKVLASGGLRIQKLRPEDSGIFQCFASNEGGEIQTHTYLDVTNIAPVFTQRPVDTTVTDGMTAILRCEVSGAPKPAITWKRENHILASGSVRIPRFMLLESGGLQIAPVFIQDAGNYTCYAANTEGSLNASATLTVWNRTSIVHPPEDHVVIKGTTATLHCGATHDPRVSLRYVWKKDNVALTPSSTSRIVVEKDGSLLISQTWSGDIGDYSCEIVSEGGNDSRMARLEVIELPHSPQNLLVSPNSSHSHAVVLSWVRPFDGNSPILYYIVELSENNSPWKVHLSNVGPEMTGVTVSGLTPARTYQFRVCAVNEVGRGQYSAETSRLMLPEEPPSAPPKNIVASGRTNQSIMVQWQPPPETEHNGVLRGYILRYRLAGLPGEYQQRNITSPEVNYCLVTDLIIWTQYEIQVAAYNGAGLGVFSRAVTEYTLQGVPTAPPQNVQTEAVNSTTIQFLWNPPPQQFINGINQGYKLLAWPADAPEAVTVVTIAPDFHGVHHGHITNLKKFTAYFTSVLCFTTPGDGPPSTPQLVWTQEDKPGAVGHLSFTEILDTSLKVSWQEPLEKNGIITGYQISWEVYGRNDSRLTHTLNSTTHEYKIQGLSSLTTYTIDVAAVTAVGTGLVTSSTISSGVPPDLPGAPSNLVISNISPRSATLQFRPGYDGKTSISRWIVEGQMRHQGVGLPAEVTQPSHEAGLEPANLGSLWLLSLVYWCYSQKLWEFSC

SEQ ID NO: 181 - DNA, 20 bp, Artificial Sequence
  Description of Artificial Sequence:Primer
cttctgctctaaaagctgcg

SEQ ID NO: 182 - DNA, 20 bp, Artificial Sequence
  Description of Artificial Sequence:Primer
cgacctgcagctcgagcaca

1. A purified protein selected from the group consisting of:
(a) a protein which consists of an amino acid sequence represented by any one of SEQ ID NOS: 1, 3, 5, 7, 9, 11, 13, 15, 17, 19, 21, 23, 25, 27, 29, 31, 33, 35, 37, 39, 41, 43, 45, 47, 49, 51, 53, 55, 57, 59, 61, 63, 65, 67, 69, 71, 73, 75, 77, 79, 81, 83, 85, 87, 89, 91, 93, 95, 97, 99, 101, 103, 105, 107, 109, 111, 113, 115, 117, 119, 121, 123, 125, 127, 129, 131, 133, 135, 137, 139, 141, 143, 145, 147, 149, 152, 154, 156, 158, 160, 162, 164, 166, 168, 170, 172, 174, 176, 178 and 180; and
(b) a protein that activates NF-κB (Nuclear factor kappa B) and consists of an amino acid sequence having at least one amino acid deletion, substitution or addition in an amino acid sequence represented by any one of SEQ ID NOS: 1, 3, 5, 7, 9, 11, 13, 15, 17, 19, 21, 23, 25, 27, 29, 31, 33, 35, 37, 39, 41, 43, 45, 47, 49, 51, 53, 55, 57, 59, 61, 63, 65, 67, 69, 71, 73, 75, 77, 79, 81, 83, 85, 87, 89, 91, 93, 95, 97, 99, 101, 103, 105, 107, 109, 111, 113, 115, 117, 119, 121, 123, 125, 127, 129, 131, 133, 135, 137, 139, 141, 143, 145, 147, 149, 152, 154, 156, 158, 160, 162, 164, 166, 168, 170, 172, 174, 176, 178 and 180:

2. A purified protein that activates NF-κB and comprises an amino acid sequence having at least 95% identity to the protein according to claim 1 over the entire length thereof.

3. An isolated polynucleotide which comprises a nucleotide sequence encoding a protein selected from the group consisting of:
(a) a protein which comprises an amino acid sequence represented by any one of SEQ ID NOS: 1, 3, 5, 7, 9, 11, 13, 15, 17, 19, 21, 23, 25, 27, 29, 31, 33, 35, 37, 39, 41, 43, 45, 47, 49, 51, 53, 55, 57, 59, 61, 63, 65, 67, 69, 71, 73, 75, 77, 79, 81, 83, 85, 87, 89, 91, 93, 95, 97, 99, 101, 103, 105, 107, 109, 111, 113, 115, 117, 119, 121, 123, 125, 127, 129, 131, 133, 135, 137, 139, 141, 143, 145, 147, 149, 152, 154, 156, 158, 160, 162, 164, 166, 168, 170, 172, 174, 176, 178 and 180; and
(b) a protein that activates NF-κB and consists of an amino acid sequence having at least one amino acid deletion, substitution or addition in an amino acid sequence represented by any one of SEQ ID NOS: 1, 3, 5, 7, 9, 11, 13, 15, 17, 19, 21, 23, 25, 27, 29, 31, 33, 35, 37, 39, 41, 43, 45, 47, 49, 51, 53, 55, 57, 59, 61, 63, 65, 67, 69, 71, 73, 75, 77, 79, 81, 83, 85, 87, 89, 91, 93, 95, 97, 99, 101, 103, 105, 107, 109, 111, 113, 115, 117, 119, 121, 123, 125, 127, 129, 131, 133, 135, 137, 139, 141, 143, 145, 147, 149, 152, 154, 156, 158, 160, 162, 164, 166, 168, 170, 172, 174, 176, 178 and 180.

4. An isolated polynucleotide comprising a polynucleotide sequence selected from the group consisting of:
(a) a polynucleotide sequence represented by any one of SEQ ID NOS: 2, 4, 6, 8, 10, 12, 14, 16, 18, 20, 22, 24, 26, 28, 30, 32, 34, 36, 38, 40, 42, 44, 46, 48, 50, 52, 54, 56, 58, 60, 62, 64, 66, 68, 70, 72, 74, 76, 78, 80, 82, 84, 86, 88, 90, 92, 94, 96, 98, 100, 102, 104, 106, 108, 110, 112, 114, 116, 118, 120, 122, 124, 126, 128, 130, 132, 134, 136, 138, 140, 142, 144, 146, 148, 150, 151, 153, 155, 157, 159, 161, 163, 165, 167, 169, 171, 173, 175, 177 and 179;
(b) a polynucleotide sequence encoding a protein that activates NF-κB and hybridizing under stringent conditions with a polynucleotide having a polynucleotide sequence complementary to the polynucleotide sequence of (a); and
(c) a polynucleotide sequence which encodes a protein that activates NF-κB and consists of a polynucleotide sequence having at least one nucleotide deletion, substitution or addition in a polynucleotide sequence represented by any one of SEQ ID NOS: 2, 4, 6, 8, 10, 12, 14, 16, 18, 20, 22, 24, 26, 28, 30, 32, 34, 36, 38, 40, 42, 44, 46, 48, 50, 52, 54, 56, 58, 60, 62, 64, 66, 68, 70, 72, 74, 76, 78, 80, 82, 84, 86, 88, 90, 92, 94, 96, 98, 100, 102, 104, 106, 108, 110, 112, 114, 116, 118, 120, 122, 124, 126, 128, 130, 132, 134, 136, 138, 140, 142, 144, 146, 148, 150, 151, 153, 155, 157, 159, 161, 163, 165, 167, 169, 171, 173, 175, 177 and 179.

5. An isolated polynucleotide comprising a nucleotide sequence which encodes a protein that activates NF-κB and has at least 95% identity to the polynucleotide sequence according to claim 3 over the entire length thereof.

6. An isolated polynucleotide comprising a nucleotide sequence which encodes a protein that activates NF-κB and has at least 95% identity to the polynucleotide sequence according to claim 4 over the entire length thereof.

7. A purified protein encoded by the polynucleotide according to any one of claims 3 to 6.

8. A recombinant vector which comprises a polynucleotide according to any one of claims 3 to 6.

9. A transformed cell which comprises the recombinant vector according to claim 8.

10. A membrane of the cell according to claim 9, when the protein according to claim 1 or 2 is a membrane protein.

11. A process for producing a protein comprising,
(a) culturing a transformed cell comprising the isolated polynucleotide according to any one of claims 3 to 6 under conditions providing expression of the encoded protein; and
(b) recovering the protein from the culture product.

12. A process for diagnosing a disease or susceptibility to a disease related to expression or activity of the protein of claim 1, 2 or 7 in a subject comprising:
(a) determining the presence or absence of a mutation in the nucleotide sequence encoding said protein in the genome of said subject; and/or
(b) analyzing the amount of expression of said protein in a sample derived from said subject.

13. A method for screening compounds in respect of activity to inhibit or promote NF-κB activation, which comprises the steps of:
(a) providing a cell with a gene encoding a protein that activates NF-κB, and a component that provides a detectable signal associated with activation of NF-κB;
(b) culturing a transformed cell under conditions, which permit the expression of the gene in the transformed cell;
(c) contacting the transformed cell with one or more compounds;
(d) measuring the detectable signal; and
(e) isolating or identifying an activator compound and/or an inhibitor compound by measuring the detectable signal.

14. A process for producing a pharmaceutical composition, which comprises the steps of:
(a) providing a cell with a gene encoding a protein that activates NF-κB, and a component capable of providing a detectable signal;
(b) culturing a transformed cell under conditions, which permit the expression of the gene in the transformed cell;
(c) contacting the transformed cell with one or more compounds;
(d) measuring the detectable signal;
(e) isolating or identifying an activator compound and/or an inhibitor compound by measuring the detectable signal; and
(f) optimizing the isolated or identified compound as a pharmaceutical composition.

15. A kit for screening a compound in respect of activity to inhibit or promote NF-κB activation, which comprises:
(a) a cell comprising a gene encoding a protein that activates NF-κB, and a component that provides a detectable signal upon activation of NF-κB; and
(b) reagents for measuring the detectable signal.

16. A monoclonal or polyclonal antibody that specifically binds to the protein according to claim 1, 2 or 7.

17. A process for producing a monoclonal or polyclonal antibody that specifically binds to the protein according to claim 1, 2 or 7, which comprises administering the protein according to claim 1, 2 or 7 or epitope-bearing fragments thereof to a non-human animal.

18. An antisense oligonucleotide complementary to the polynucleotide according to any one of claims 3 to 6, which prevents NF-κB activator protein expression.

19. A ribozyme which inhibits NF-κB activation by cleavage of RNA that encodes the protein according to claim 1, 2 or 7.

20. A method for treating a disease, which comprises administering to a subject an amount of a compound screened by the process according to claim 13, and/or a monoclonal or polyclonal antibody according to claim 16, and/or an antisense oligonucleotide according to claim 18 and/or a ribozyme according to claim 19 effective to treat a disease selected from the group consisting of inflammation, autoimmune diseases, infectious disease, cancers and bone diseases.

21. A pharmaceutical composition produced by the process according to claim 14 as an inhibitor or promoter of NF-κB activation.

22. A pharmaceutical composition according to claim 21 for the treatment of inflammation, autoimmune diseases, cancers, infectious diseases, bone diseases, AIDS, neurodegenerative diseases or ischemic disorders.

23. A method of treating inflammation, autoimmune diseases, cancers, infectious diseases, bone diseases, AIDS, neurodegenerative diseases, or ischemic disorders, which comprises administering a pharmaceutical composition produced by the process according to claim 14 to a patient suffering from a disease associated with NF-κB activation.

24. A pharmaceutical composition which comprises a monoclonal or polyclonal antibody according to claim 16 as an active ingredient.

25. A pharmaceutical composition which comprises an antisense oligonucleotide according to claim 18 as an active ingredient.

26. The pharmaceutical composition according to claim 24 or 25, wherein the target disease is selected from the group consisting of inflammation, autoimmune diseases, infectious diseases, cancers, bone diseases, AIDS, neurodegenerative and ischemic disorders.

27. A method for obtaining a novel gene having a function, which comprises at least the following steps:
(a) constructing a full-length cDNA library by the oligo-capping method;
(b) cotransfecting the full-length cDNA and a plasmid containing a factor emitting a signal indicative of the presence of a protein having the function into cells; and
(c) selecting a plasmid emitting the signal.

28. A computer-readable medium on which a sequence data set has been stored, said sequence data set comprising at least one nucleotide sequence selected from the group consisting of SEQ ID NOS: 2, 4, 6, 8, 10, 12, 14, 16, 18, 20, 22, 24, 26, 28, 30, 32, 34, 36, 38, 40, 42, 44, 46, 48, 50, 52, 54, 56, 58, 60, 62, 64, 66, 68, 70, 72, 74, 76, 78, 80, 82, 84, 86, 88, 90, 92, 94, 96, 98, 100, 102, 104, 106, 108, 110, 112, 114, 116, 118, 120, 122, 124, 126, 128, 130, 132, 134, 136, 138, 140, 142, 144, 146, 148, 150, 151, 153, 155, 157, 159, 161, 163, 165, 167, 169, 171, 173, 175, 177 and 179, and/or at least one amino acid sequence selected from the group consisting of SEQ ID NOS: 1, 3, 5, 7, 9, 11, 13, 15, 17, 19, 21, 23, 25, 27, 29, 31, 33, 35, 37, 39, 41, 43, 45, 47, 49, 51, 53, 55, 57, 59, 61, 63, 65, 67, 69, 71, 73, 75, 77, 79, 81, 83, 85, 87, 89, 91, 93, 95, 97, 99, 101, 103, 105, 107, 109, 111, 113, 115, 117, 119, 121, 123, 125, 127, 129, 131, 133, 135, 137, 139, 141, 143, 145, 147, 149, 152, 154, 156, 158, 160, 162, 164, 166, 168, 170, 172, 174, 176, 178 and 180.

29. A method for calculating identity to other nucleotide sequences and/or amino acid sequences, which comprises comparing data on a medium according to claim 28 with data of said other nucleotide sequences and/or amino acid sequences.

30. An insoluble substrate to which polynucleotides comprising all or part of the nucleotide sequences selected from the group consisting of SEQ ID NOS: 2, 4, 6, 8, 10, 12, 14, 16, 18, 20, 22, 24, 26, 28, 30, 32, 34, 36, 38, 40, 42, 44, 46, 48, 50, 52, 54, 56, 58, 60, 62, 64, 66, 68, 70, 72, 74, 76, 78, 80, 82, 84, 86, 88, 90, 92, 94, 96, 98, 100, 102, 104, 106, 108, 110, 112, 114, 116, 118, 120, 122, 124, 126, 128, 130, 132, 134, 136, 138, 140, 142, 144, 146, 148, 150, 151, 153, 155, 157, 159, 161, 163, 165, 167, 169, 171, 173, 175, 177 and 179, are fixed.

31. An insoluble substrate to which polypeptides comprising all or a part of the amino acid sequences selected from the group consisting of SEQ ID NOS: 1, 3, 5, 7, 9, 11, 13, 15, 17, 19, 21, 23, 25, 27, 29, 31, 33, 35, 37, 39, 41, 43, 45, 47, 49, 51, 53, 55, 57, 59, 61, 63, 65, 67, 69, 71, 73, 75, 77, 79, 81, 83, 85, 87, 89, 91, 93, 95, 97, 99, 101, 103, 105, 107, 109, 111, 113, 115, 117, 119, 121, 123, 125, 127, 129, 131, 133, 135, 137, 139, 141, 143, 145, 147, 149, 152, 154, 156, 158, 160, 162, 164, 166, 168, 170, 172, 174, 176, 178 and 180, are fixed.
